United States Patent Application Publication US 2013/0096032 A1 - sequence listing, part 9

SEQ ID NO: 262 - DNA, 107848 bp, Arabidopsis thaliana
gaattcagatgtttataaattgtctctagtttcaagacttagttaggttttaatgaaacttgcaggtgaaggatatatattacatctactaagatcaagcagagtggctaagaagaagctgttatctgaagcctcaagagtaacctttttgcacaatgtgaattgataataaaatactcttatagaattagtcttctgtacaactcttaagctgtaaaaaaggttaggccattgtttttgaccttaatgaaatgttcttactaaatttgttgaaatgtatctttagctagccatatttaacttggtctcaagttatttctgtctgcttttagatatataattcctccgcaagtaaccacaaatattgaaagcgcaagacttaaaacagaacacaagaaacagaggatatatgaagaaaaaagaagaacacatgcgtaatttagttaagcatgtgttcaataatcttcaggggttgagaagttgtttttttctgttaatcttgatgactcaaaggtatatagttcaataatcgtgtatgatcaaaaggacaagtattggaaactcttgagggtttacaaggtttccggcgaacatccagttagtggtttttggacagtgaattttaagcgttgtcgaactgttactctttgcagaattcaggtatgcttcagtgatgagtatgcttttagtaaaagtacttttgatgatgaagatttcagattttcagacatttaaacaaaataaaattagctttcatagaaaagtatctttagaattagacatgttgaagaggaattaaacagtttacttacagtaacaaggtgtcacgttctttctgtttacttttgaatatgtaattcaagtaattattgcaagtgtaagaaagattaaccaaagaaatctgaatcaagcaaaacattgcggatcttgcaatcgataatgtccacaaatccagagaataaccctctcaagatcattttcataacattaccgatagcgattacataacattttattattctcatattaaaacctcttataatccagccatcttcttctgcttttcgtttatcaacctaactaactctagtgcaaattcagcagacctgtttttgcgccgttgcctagctacttccacagtgatggatccaacattaacacatttacttcgagactcttccacgtccataatcataatggcatctgtcatagatttttcctcctcgaaagtaacaaatccgaatcttcttgactttccagtgtcacgatcgtaaatgatctgtgaaaaaaacatagaaaaatcaaaacaaatcagtaagaactccaacaataaaaaagttgataccaaaaacgtgaaaggatattcatagatcaatctcaattcttaaggtcatgtatagataacggactttagaatcgatcacgttgccaaactttgaaaatatatccgtaagatctttttcatcggtgtcctgatcaagaccacgaacaaagcaagtgtattcaacatttgtagccattgtttgaaagagatatatcaaagataaagtataggttctaccgagcccaaaaaatgcaaaaatataggttctaccgagaattgaactcgggttactggattcagagtccaatgtcctaaccgctagaccatagaaccaattgatacgtatctaacttattatttatttatacttgttttatttcatcttctccgagccgttgctttgctctatctcttttccattttactactttctccgttcactgtaaaaccatctctctcaattctctccgacaacgttgctctaatgcttctccactgcaacgttagctactacacctcaacgttttccttcatctcctcatctctccgccgtcaagacaacgccgacgattcacaagatacagtaatccgtcgccgccacaatgctagatccatttctctatacatccgccataatcgagacctaaagctcaacaaaaaccctaacgaatctcaagaaacctttgttcctcctcctcctcctccgcggcgagatttagacggtgaaaaccgatccaagctacttgagctctctcttgtaactagaagaactccacaatttcctggttcaatctacgctcaatctgcttctgatgctgatattgcttcttctcttccttcgcttcgtaattttctcggctctgatggtgatgatgatggagagagtgagagggagatgatagttaaagcgcttgagattagaaggaaagtgacgaaagagattatcaaagagtctttggttaggaaaggtagatttgggattacgtatgcgactaatgtcactgatcgtttgggtgatttcgttgatcatgttatgattcaagctgcggcgttgaaacggttgccggaattttcagagtctagattcaatcttcgcgctaggacggttattgaagactccaatttcgttcctcttgtaaggtcaagctccatttttttgtgcttctgggtttgtgtatattagtgcacataagttgttcgataatatgtctcttagaaacaagttcaaagaagtagtagaatatttttaactatgtttctgaattgtgcaggtggttgaagcaccatgagttgtcatataatagaatagcgaagatcatatgcatgtcaaaaggaaatctcgactccataaggatcatgatcgagtggctgaagagcattcatgtgaagggtgaattcattgcagttgcgttcttgagatctggggataatatattgcaacgtaaccgtgaggaactaaacgaaattgttgagtatctagagagcaatggtgtgaggagggattggatgggttatgtggttggaagatgtcctgagttgctgtctttcagcatggaagaagtgaaaagccgtgttgatttcttcttgaaaatgggtatgaatcagaatgactttggcactatggtctatgattatccaaagataattggcttcttctcattccaagtgatggagaaaaaggtactgaaagctctttttaatactccagcgttaagattgtcgtttaagttcataattgtgttgcttgtattaaaccagatcaattacctgaaagagtttggccttagcacagaagaagttgggagactattagcctacaagccacacctaatgggatgcagtattgaagaaagatggaagcctctagtcaaatatttctactaccttggaatccccaaagaaggaatgaaaagaatccttgtcgtgaaaccaattctttactgcattgatttggagaagacgatcgccccaaaggtagttgaacttcgttataacgtatgaactccctataccatacacacagcagattccattaactcagcttctctcttgtgtttttaaaggtaagatttttgcaggagatgggtatccctaatgaagccattggaaacatgttagtaaagtttccttctttacttacaaatagcctctacaagaaaatccgacctgtggttagtaattacttcctctatgaaacaaagatgttccatcgaatgttgttatgttagtgttgttactcataacatatgatgatttcagaagctgcatctgatattgtacaagttgtggttgtacaggtgatttttctcttaaccagagccggagtaacccaaaaggatatcggtaaagttatagcaatggatccagctctccttggatgcagcatagggacgaagctagaacccaacatgagatactatatatcattgggaattcgattttatcaactaggcgaaatgattgctgatttcccgatgctgcttcggtataacgttgataatctgcgcccaaaataccgttacttgcgaagaacaatgatccgtccgcttcaagatctcatagagtttcccaggtaccagaaaaagaattgataaaaataatcccttcaaagtgtagcttttgagaaccatggcacttgtaacagattttttagctactcactagagcgtcggataatcccaaggcacaccattatggttgagaacagagttaacttcaagctcagatacatgttggcttgtacggatgaagagtttgagaggagagtgagagataaagtggagagaagagagagattcgaagctggcctcgactctgaggattctcaaccgtcggatgagaacatctccgatcaggagattgctttctcagacgaagcggaagaagaagaggatttgacagaatgaagaggatttagcataatgaatagttctgtacagtttaacacaattataaacgaacgaatgtgtgaatgagtctatatttataaatactaaaatgagaatacttgttctttcatgtcctaagaattcgaaaaagcacttttacagtttgtgaaaccaaacgctcaatcgcctcctccgccatcttttctcttccggtgctcttgattctctcaactccgccgtatatatttcaaataaagagagagtcggtttagggttaaccagaagtgagtgtataattgatagattagagagtattgggacttttttaatctatagcgataacttcgggtccttaagttgaaaataatttttcttcagctattgactgaaatgacatcgttttagtatgattctcagttttcggctatttgcatgggagtgccacgtggcatgtggagaagttgccagtgaacgagttattctctctacctcaacgtcactaaaaccgaatgcgaaaaggaaaaaaaatagcaaaagcaaaaaactaaaacagaggattctcagagatcacgagagcaagaaaacgatgaggaagatgaagcacttgtcctccattgcaaacgatgtcgttcagagatgctcacagtatttcttttctccttgtctatatacttatttgcagatctatgttttgattaatagaaattatagtgtactggatcataatcaaaatcatggaagtcaaacaatttatgggatttcttttccttgatggtaaagccaaaagaacagcaaaccggttacacccggtttagcatcgttttaatctatgaattttgtgatgattgatgttgtagggaactagagacaaccattgatgatttagtgaaagaatttgaatgtcaatggaagccaggaagcacgggaggtacttactcgaagaagtttgtggaattttgcaactcaaaggtgacgagtcgggtttgtgaaaacatacttgagagaataaaagatggttcctttacacgtctcacgttcgatatgatgcttgcgtggcaacaacctgacgcagatgataatgagtcttataaggtatatacctaactgtaacttgatatgatcacttaaagtttcttggttctcaagtcatgtttttacttgtgttcaaaggaagcagtaggtaaagagagtgaagacaagaggattcaagcaactttatccccagagcaagatgacatctcgcttttttattcagacatgatgccgcttctcgtaagcaatgtttgtttttcgaactgtgacatcggattaacttttataaatagtagtttatagtacctctcaacttttatatatcatgtgaaggttgatcatgaaccaagtgtgggtgaagatgcttttgtctatttaggctcaatcattcctcttcccgtggatatcatcaacggaagatacacatttgagactctaactgctccgaccggtcaccaacttcacttcccagcttatgatatgtttgtcaaagaaatacacaagtaattattcttatacatagcatagttggtttctaggctcaatacatatgatgtcttcttttctatctatttgatttaatttcgtattatttaccatgtatcaatcaaggtgtatgaagcatttgcaaaagcaatcgacgcctaaagggatcgaattagcggatgatgaaattatattgcacgttgaaggaacaatggcttcacagagagtgattcgccacattaaagaaacaagctggccaggtttagtttcattattgtttccttatgttatgtatgtctcaagtttgatgaaaaaaaaatgtcttgaattttgtaggtaggcttactttgacaaactatgcactatacttcgaagccgcgggaattataaactatgaagatgctataaagatagatctttctaaggacaatgaaaagtctacaaagcctatgtccactggtccattgggtgctcctctttttgacaaggccattgtctacgagtctccagatttgtaagaattcatcaatttatggaacatgttggcttatttgtgtatgaattataacagaaaatttttcttttgatgcatttttagtgaggagggaatagtcatagagtttccggagatgacaagctcaacgagacgagatcattggcttatgcttgtaaaagaaataacattaatgcacaagttcttgaggaaattcaatgttgagtctcccttgcaatcatgggaaatccattcaagaacaatcttgggaataatacggttgcacgcagcccgcgagatgttaagaatttctcccccggatccaaaaaactttttaatatttagtttgtttgaggaagttccaaagggagactatgtacttgaggagctcgcagagattagtctaaagataggcactaccagaaacccgtgtagtgctagctccatattgaggaatatgaacatggatcagcttggtgacatgataaaagaagagggtgaagatatatgcaaggagaaggtggtcaaagtgactgataaagaagaaatgcttgcgtctcttgagagtgcagtgaatcaatctagagaagagggaaaggttattgaaaaggctagagccacgacagcggaactcgaagaagaagggattagtgaaagtgtagcagttcttatggtaagtagatttttatgaatgtgcatgttggcataatttatggtgtattgaactgacaataatgagatattctgtaggagttgttgaggccgttgcaagacgtattaccatggttccaagaagtgatttattgggaaaggccgtctcgtacactgtttgttttagccattactattttaaccgtctacaagtgagtttaaaagtaacataacggagatgagttagttcatggatacatatattaatcaagaaactaaacttatgttacagggagtgggttggtaaggctatagctgcttgcttaatatgggtggtggcaaaaatggctcaagctagaaataagatggtccatacaaaaagtgaggatgcggtaacagtgagcactgaatctgaccaaacagtgactgagagcattgtgtctgctcaatatggcttaattagacttcaccagttgatgcaacatgttaacgtcaccatcttgaaattgcggtctctatatacctccaaggctagcaaggtaactaatgtttatatcgcgatattaatcgtttttgttatttcgaaagtgtgttctcttttaaagtgtagcgtctcttactcgtggttgtagcatgcaagcatggtgatggcgttgatgctagtgttggcgagcttcttcgcagtggtgccgttcaagttgttcataatatttggtatagtatattgctttgtaatgacatcaagcgtcggaacatacatgagcaacgatcagagtaaccggagaatgaaagagtggtgggattccatacccattgttcccgttcgtgtacgtaacgcttcgtccaagtagttcttcatcacttagtgtgagataaggcacaaagctttaaaaggagcggtagtggtccgaatgttttttctctcctttttatcaaacgctactagagaaagaatgttttttaaacagttttgttttgtaaaatattttcaatcttacgttactgctactattatagtaataaataagaaaattagtattaatatatttcttttctttctatggaattggaacctatagaagttatattaccaattggcaattgatcgaattactcgtcaacagtttatattattttcgtctcctccgggagaccgggacaaataaaaagtagtacttcatctgtttcttattaatctattttctataagaaaaaaatatttcaaacaaattctttttatcatcaattgtaaagttaaaaacaaaataattgaataataatggtttagagttacagaaaattgtaagtcacaaattaatgtatttataattaagttttaatatgtttcatgcatgaaaattctactaaacataaacatatggaattaacctaaacatatactactagaacagtatctcaacctaaaattattttgataaaagcacatttatttattttgaagtcaacatttatttatccaaaatcaaattgtatggaaacaaatttgtgttttaacttttgttatattaattgttaaatttttgacccgtcatataagacttaatttaaggagcattggagcaagtaagaagtcaagaacatcaaaaaagatttacaaccaaactgggaaaaaatatgtatatatatatattataagagaagaagtttttttaatatataagagaaaaaattagatatctacggaaaatgaaaagcgagaaatctgcagatgcttatggaacatattttcttctaatatcaaccattttcttgcttttcattgcacgtaagtcattacttggttcataaaattcaaatacaaaaactgatctttttgtgatagtgggtgatctttgaatgtattggttatgtttttgttttatatatatatatatatatatatatatatatatatatatatatatatatatatcaattacaggacaagcaagttcgtaccaaatgctcatatgtttagatctaaatatatcatgtgccgactgccaaaaacagtgcgacgagacaagttatggaggaatgtgtttaaatggaggcagaacttgttgttgcaaaaaaagtcctccgccatcatattatgatcctaggcccccttcttcataatcatatggaatgtgttcctatttggtactatcattttggatttgctcaaacatatcaaatttatactttgaaaagaaaagaatcatcaaaataaagttattttattattttttctttgtttactaatctcacaatcataacgtcaattatatagaaattttcttaacatgagtcaaaataagactaacgctaaattttacattctaattctaattttaagtgatgtttctgaaccaaataatatgtattaagtttactaatagtttaacatattaacatttaaccagcatatatgaatagcttatcgattagaaagtgatttctaacaaagccacacaatagtccagatacactcaaacccgatagtgcataattaacagaactactataatcacaaacaaagtgtatgattgagccacatattaacctagatatagaaagataatataccatgggaagttatatattattgttcaaataataaaattcgttatattttttaaccagaaaatggtgaaacaacattaattatcagtagaacacatgttccatatttcattagttttggaaaacttcttagaactaaaacgtttgagttgatacatttcaaaaaataatcccgtccatttcttatggcattcctttccagctttcactatcccccaacaacaaacccttgaaacacttttgttctgaacaatataagctatcacttcgtccgcacattgatatgggccatatggcatgtccatctttttaccgcagttcttaagataatctttttctttttctgaatatttacgtaacatattgtcgttataatcgtctgatgccggtgaccttgccatcattgcatcaaactcgtcgtctgaaatgagtagtggctcgtcattacctctttctttggccaaagttagatgagaaaacgatagcaaaaccatgatcgaagaaaatatcatgaacatggttttattctccattttaaaatattttgatcttttattcttaattagtttttttttgtttctattctaccaatgaggatttctgcatgtatttatagtatcaaatgttcatagcattattatttagtaactttttattagtaaaaataacatttttctatttataacaataatttattagttatcaacataatttacatcttttgacgttttacaacgtttataaatattgttcgtttaatgcatttcagaaagcttcattgtagtatatgcatttaaagcttcattgtagtaaatttattgttcgtattcgaatgaagtttgcaaagaaatttaagaaaaagagtataaaagtaacgaaataagttatttcaaacctgcacaatagttaacaatttgtaaatataaaaatatatgggcgtattaactatttaatactgactaaaaaaataggttaatttggctccagaaaaatataacaaaaacagctaagatgtaccaatctgatattacactaaaaccgaaccaagatttacttataaagcaattaatggtttcatactttcgttaattagaaaatcaaaaatcaaaattgaaccgaactgaaccaattttagtgtatctaaactaaacataatcatattatattttaaaatttttaatactgtatttacaataaatatattcgtgttgtagaaatgtaatataaactatgtaaagtctttatctatatttataaatttatctagtcatggtaatatgtagtgcaaatataaaaagaaatcacccagcatagaaacatttaaaatttcaacaattctttgaactacatccacaaatccttcaattcttatcttcaaatgatgtgacatatttttaccccactaaaattccactaattcatttacacttgggttagacccttcttacatgttccccaccctttcaattcaggcataaagcataaccgaatcgttcacagatagagaaagagagaaagattagaagaaacaaatatggtagatcaaaataaagcatttggttgggcggccaacgacgaatcgggcgtcctctctccatttcatttctctagaaggttcctttcgtaactttcgtttacttttgagttttgagaacacacttaattagtctttgattatctttcacaagtgttgtatgttttggtgtcataatattgcagagaaaatggtgagaacgatgtaacagtgaagatcttgttctgtggtgtttgtcactctgatcttcataccatcaagaaccattggggattctctcgttaccccattattcccgggtattctcattacttgccatttctcttatcaatgctcccaaatattcttatttcctttgttggagattttattagctttatagaataagaaatgtctaaggtttggattaaaattatattggctaggtgttgaccctctccgtacgattagggcttagcagttttgagcattggacaagttccgctattattaatttattactgattattaacaactatacttttgttaatttgctaggcatgaaatcgttggaatagcaacaaaagttgggaagaatgtgacaaagtttaaagaaggagaccgagtaggagtaggcgtaataatcggttcatgccaatcatgtgaatcatgtaaccaagacttagaaaactattgtcctaaagtcgttttcacatacaactctcgttcctctgacggaaccagcagaaaccaaggtggttattccgacgtaattgttgtcgatcaccgctttgtcctaagcattcccgatggtttaccaagcgattcaggcgcgccgctgctctgtgctggaatcactgtgtacagtcccatgaagtattatggcatgactaaagaatcagggaaacgtttaggtgtgaatggacttggtggacttggtcatatcgctgttaagattggtaaagcctttggtttaagagttactgtgattagtaggtcatcagaaaaagagagagaagcaattgatcggcttggtgctgattcgtttcttgttacaacggattctcaaaagatgaaggaagcggttggaactatggatttcattatcgatacggtatcagcagaacatgctctattaccgttgtttagtttgcttaaagtgaatggaaagcttgtggctttaggcttaccggagaagccactcgacctgccaattttctctctagttctcggtaaagaaaacgatgataacccgttgttataagctgtgaatctatgtttgacgtgttgtggcagtaactgttagggtttttggtgttttgttttaggaaggaaaatggtgggaggaagtcagattggagggatgaaggagacacaagagatgcttgagttctgtgccaagcataaaatcgtttcggatattgagctcataaagatgagtgatatcaactctgcgatggaccgtttggctaaatctgatgtcaggtaccggttcgtgatcgatgtggccaactctttactccctgagtcgtcagctgagattttaacggagcaggtggaccatggagtctcgatcacgtctagattctgagattttcttgagcatggttacaaaatcatgaatccgttttcttgttggacttgttacttgtcttttctttctatatgttctgttccctgtttttttctgttaattgtttagaagcaatgaaactatgacttttctagggttttgcaaaaacatgaatctactagcttgttttacaagttacttgaatagaaactttctctgttcttactatgctctgtttcttggcaacactgtttttgttctttgtccaggtataaattataaatgcggttttagtcacacggaaaaatccaaagggagatgccattatatcatttaaaaaccatatattataacaaaatcattactggagtttgcatacatcaaagtttcacagaggaaggcgccggagaagaaccaccggaatttggagattgacagaaaccacgaagaacgttggtttcatcagaggtaaagcctagagacgtgagcatcgcaggccaacaatcggtggtgatgacctcgacggcttgacagcaatcgacgccgagtttggtttcaccgttgaggaagaagagaacgatttcgttggtgcatgatttgagctcataaagtgcgttccaacactccattagtcctcctccgttgagtcttgccgctatgtttgtggaatcttccgtctccgggagagttcttccggagatgttgagaacgaggaggatagcgatggtggcaaagaggaaacttgtgttagaagccattattctttctttttggggtttttgttttgttttgttttgttttgcgatgattgagttacgagagttctgtttttatattgtggttttggatggattcgaagcttagtggtgatttaagagtaattaaaaagttggattagtgggaggaatgggaaaggattgacggtaaatagtcacttaatcatgaaacgttaaagcatttgactgtagaaacgtatttagtatatattggcatgttgaatcagtagcgctcctattggagacgaaggtttaacgtcgtgttacagaaagtgaaccaatgcttttgtaataaactcattgaactttatgctatatactgtatatggtttttactactcattgaactttatgctatgttttctttaaactccttgtataaatatatttcttaggaattacttttaaattatgtacaaagacatgtattacagaaaaatttcatgttgtaatctaaataagatgctatagtgttgtcgatgtgtcatgtgtgtcactatccatcattaaacatgtggtaaaattacagtctataaccatcatctagatcagatatatctttttaagaatttaaacttatggtcaaattttcacaatctcgaatacaaatatacaagaatgtatattctcaagtctcctagtttctctgttatttgcatcttttgtgacttacaaactatgataacttttataaaatagatataattagctatcttcttggacaagttacctctcttaggttgtttctgttgtttactatgctctgattcttaacaaaaaatggtttattttgttctgataatggttttaagctattccagctcagtggatctctgtccttgtataaacgcaatgataaaccaaacgcaaatgcttttattccaaactcaaaatcagtgaacagacattttctcaccatacattcatagaaagctatatattataaccattactaatgtcttcttacgtcagcgaggaacatttatcaaagtttgacaggggaaagagctggagaagaaccgccggagttcggagattgacagaaaccacggaggacattggtttcctccagtgtaaagccaagagaagtaagcatcgccggccaacaatcagtggtaatgacatcaacggcgttgcagcaaccgtagccgagtttggtctcaccgttgagaaagaagagaacgatctcattagtacatgacttcagctcgtagagtgcatcccaacactgcatcagtcctcctccggttagtctagccgctatgttggtggaatccgccacgggcgggagtgctctgctggagacgttgagaacgaggagaagagtgacggtgacaaagaggaaacttgtgttagaagccattgtgttttcttttgaagattttgtgttgtattgtgtgatggtttagaggatttggtaagagctgctatttataatactgtgattatgaaaggatttttgaggtttaattatgattaaagatggtttttagtggaggaagtgggagagggcagagagttaatgattttacttaaatcttaaatcatgtaacttagagaatgattgaataggtggtcttaacggaaagatacaagcgaagagtcaatggttacttgataaatatagaaactttgaagattgtataacaagagtggctgtaatacagtggttagtattctacgttgaggccgaagggacctgggctcgattcccagcagacacactatctttcatcataatgtcttccaacacttttagcttcatccacttatgcacctaacgcttcttctctctatatgacacatacaggtggacacatagagggaaagtcagcttttttcttttctaatttgtctccagaagttttaccatattctccgctttcactcaaatcttttacagagatcttttcatctcagtgagctttcactttctttcatcctcaacttcagatttttgtctcccgtatagtttttgttgttgttgttgttgttattttctctttctctctgtgttccgtgtgtctttctctaaaccctagaatttcacattgcttctgtgtcactcttcaaatttctgaatagatttgatcacaaaaacgtaaaaagggttttcgtattttgtggaatcacattgcttctgtcagtctccaatttctttgacccggaaatattgtttctttttttccctttttcttttgtaaatttgggattttttcggagcttttatttttagttattgaaaacaaaaaaaataccaaaaggcaagactcggactcagtggttctccttctcccttttatctagtgtgactgcgcatttcttgtaatgggagtgcaaccgtctggatccattatccgggtagggtcagacccgttcatgttctctgagctgaagaatctgtaaaaagatacactttttttctgtttttgtgatctgatcggactagtgaatcatgaacactggagggagactcattgctgggtctcacaacaggaatgaattcgttctcattaacgccgacgacactgccagagtaagatttctcaattttgttttttttttcttttgagaaaaaaacaagaatgtatcttctgtttggatcgatctgggtttggagattgaatctgcgttttctaaaacagaagtctttatggaaatttcacctgcttttttgtctcgaaatattgcatgatttatacgtgtcggatatgatcaatgagacaaaagttagtgtcagtttcagactcatctccatgcggtttgtcagcttgttgagtatttaaattcgtttgtcatttgttgtggattccaagaagttgcatacacagtattgttaattaatggaaaaaagtttaaaactttatgaagttttgttaagatttagtatcaggagctttgttaaatgatataataagattgatcttgttttgttactatgaatgaatgtggcaatgtgtacagatacgatcagcagaagaactgagtgggcaaacttgtaaaatctgtagagatgagattgagttaacagataatggtgagccatttatcgcttgcaacgaatgtgctttccctacgtgtagaccgtgctatgagtatgaaagaagagaaggaaaccaagcttgtcctcagtgcggaacccgatacaagcgtattaaaggcaagagacattttcttctctgtatttttatctcaacacttgctttgagaaaagtggattgatttttatgttgtaggtagtccaagggtcgaaggggatgaagaagatgatgacattgatgatctggagcatgagttttatggaatggatcctgaacatgttactgaagctgcgctctattatatgcgtcttaacactggtcgtggtactgatgaagtgtcacacttgtattcagcttcaccaggctctgaggttcctcttttgacgtattgtgatgaggtcagacttcatgatcgattttctgtgtacattaatgtcgaaattcctacggtgtgatgattcttttgatatacatgttttaggattctgatatgtattcggatagacatgctcttatcgtgcccccatctacgggtttggggaacagagtccatcatgtgccatttacagattcttttgcatctagtatgtgttactcataagctctatctcaaaatgctatcgttttgtatgaagttgcctcctgatgaagaaacccacatgttgttacagtacacacaagacccatggttcctcagaaggatcttacagtttatggatatggaagtgttgcatggaaagaccgtatggaagtatggaagaaacaacaaatagaaaagctacaagtcgttaagaatgaaagagtaaatgatggtgatggcgatggattcattgttgacgagctcgatgatcccgggctaccaatgtaagttgaaaccttttactgcatttttgttagtaaagaattgtgtatatgtattttcttgacatttctttgacgtggttcaggatggatgaaggaagacaacctctgtcacgaaagctacccattcgttcgagcagaataaacccttataggatgttgattttctgtcggctcgccattcttggcttgttcttccattataggattctccatccggtgaatgatgcattcggcttgtggttaacatcggttatatgcgaaatatggttcgctgtgtcttggattcttgatcagttcccaaaatggtatcccatcgaaagagaaacatatctcgacaggctttctctaaggtatgagaaggaagggaagccatcagagttagcgcctgtcgatgtctttgttagtactgtggatccattgaaagagcctccactgattacagcaaatacggttctgtctattctcgctgttgattatccggttgagaaggttgcatgttatgtatcagatgatggtgctgcaatgcttacatttgaagctctctcttacacagccgagtttgcaagaaaatgggttcctttctgtaagaagttcagcatcgagccacgcgctcctgaatggtatttttcacagaagatggattacttgaagcataaagtcgatcccgcttttgttatggaacgccgtgccatgaaggtttgttgttttatccttacaaaaagaaaggatccatccggatttgaactaaagcctgattctttttgtccattttttttggtggtgctgttgttgcagagagactatgaggaattcaaagtaaagataaatgcattggtttctgtatcacagaaagttcctgaagatggttggactatgcaagatggaactccttggcctggaaacaatgtccgggaccatccaggaatgattcaggtaatgataatgtgattatgatgattcctcatatgtcatagaactgaagcttaataagagattttttacaatggaaggttttcctgggacacagcggagtttgtgatatggatggaaatgagttacctcgtttggtgtatgtttctcgtgagaagcgaccgggatttgatcaccataagaaggctggagctatgaattccttggttaggatctgttccttttcatttttctctcttttgatttcccaaatttcgtaaaactaaactcattaacctctcttgaagatccgggtatctgctgttctctcaaatgctccttaccttcttaatgtggactgtgatcattacatcaacaacagcaaggcaattagagaagctatgtgtttcatgatggacccgcagtccggaaagaaaatatgttatgttcagtttcctcagaggtttgatgggattgatagacacgatcgatactcaaatcgcaatgtggttttcttcgatgtatgatttccatggaatttgtctttgcgttgttctatttatgttacagctcccttctcattggtgtctctatgattataaacagatcaacatgaaaggtttagatggcatacaaggaccgatatatgtggggaccgggtgtgtcttcagaaggcaagcactttatggatttgatgcaccaaagaagaagcaaccaccaggcagaacctgcaactgttggccaaaatggtgctgtttgtgttgcggtatgagaaagaagaagacaggtaaggtcaaagataatcagagaaagaagcctaaagagacttcaaagcagatacatgcccttgagcacatagaagaaggccttcaaggtaatcataataataaataacttttttttgcttatagagtaaaaaatctttatgtcatcctcctttggttgatgatgtggttttgatttgcagtgacaaatgctgagaataactctgagactgcccaactgaagctggagaagaaatttggtcaatcaccggttttagtagcttctactcttctgctaaatggtggagtgcctagcaatgtgaacccagcgtctttattgagggaatccattcaggttattagctgtggctacgaagagaaaaccgaatggggaaaagaggtaagcagagctatttactctgttctcttctctgtacttaatgtgaaagctgattatgcttttggatgatataatactacacagattgggtggatttatggctcggtcactgaggatatcttaacgggtttcaagatgcattgccatggatggagatctgtatattgtatgccaaagcgagcggctttcaaaggttctgctcccattaacttgtcggatcgtcttcatcaagttctacgttgggcacttggctctgtcgagattttcttgagtaggcattgccctatttggtacggttatggtggtggtttaaaatggttggaaagattctcttacattaactctgttgtctatccttggacatcccttcctttgcttgtctactgctcacttcccgccatttgtctactcaccggaaaattcatcgtccctgaggtaaacaagccatgatcattagtagctgtagatcattatgaaatcataagatcggaatcttgaaatcgaaagatcaaaactttgatgatgtttcattgatttgttacttttgacagataagtaactacgcgggtatactcttcctgctaatgtttatgtccattgcggtaacgggtatactagaaatgcaatggggcaaaataggaatcgatgattggtggagaaacgagcagttttgggtcattggaggagtctcttcgcatctatttgctctgtttcaaggtttactcaaagttcttgcaggagtcagcacgaacttcacagtcacatctaaagcagcagatgatggagaattctcagagctttacattttcaaatggacatctttgttgattcctccgactactctgctgatcattaacatcgttggagtcattgtcggagtttcggatgcgataaataacgggtatgactcttggggaccgctttttgggagattgttctttgcgctttgggtgattgttcatttgtatccgttcctcaaagggttacttgggaaacaagatagagtaccaaccattatattggtttggtcgattcttcttgcttccatcttgactctcttgtgggtcagagtcaatccgtttgtgtccaaagatggaccggtcttggagatctgtggtcttgactgtttaaagtgagaactaggtttctttctttataataataagaagaaaaaaagctgcagtcttgcatggttaaagattggagaatcatgaagaatacaaaacggagttttaacgatggtacaatctgatgatgataatgatggtgatgtgtgctcttttagtggtgggtaatgtgtagacataaagagctctgtgcagtttttacgtgttacgttttcttttaagaccctgaatggatgctgatttttgattcagtttttgaatttagattttagtttatagattttagattttagttttagatttttattattatatttttctttaaaaaactccaaaattttggttttttggtttttgagaaaaataacgttgattgaataaaaactagatttcctaaattttaggagaactaaaaaactaaaatcatgaatgaaaaattacaacaaaatagtttttttaaattgtagggaaaccaaaattttaaaatcttgattggtatgaaaacaagtttttctaattatttattacaatcttttcttcattaattcttttatttgattgtaataaataattaggttttttctataaaaaaatctttgttagtgtaaccagttatggcctttccttagatgataattatataaataagctcatcctaaaagtagattaagttttatttttaagttatttctattccttggtttggtgatttaactttcattctattggatcaaaagttatatactctctcacattataatacttctggttacgaagttttaaactagaaagaatcaaagaaccgtctgttgttatttttgtttattacgcgcaaaaccgtactccgtactcgtaacatgttggcgaagagcttcgaactgagggttcgatcacttccgcaatacaaaataacaacggggcgcgagccgtgcaagaacgcgggaatatagcaagcaagcagcaaggttctttaggactgtatagtatggtggtggtaatatcatcatcatttgtaacaagatacggtcaaatatttgcaaaacttgttttttcacagattccagaatccttcaacgaatgagattgtaacacgtgtaagtgagacaacttaggtgacaattccatatttggagtcggaatttggcttacgtggaacccaccgaaatcgtgtaatagaagtcaaacgcatctatatctgtgtttaagctaaaagtaaacctcattgaagaagtaacataggaaagctttcgtagccgtcagatcaaccagacaaaacgtcatatcgagacaaaaactttcgacggagcagattctacagatacaatacacacggtttcactggatttcgcccctctctctttaaacaaaattaaataatatcagaagacacgttcttcttcttacgaaaccgactttgtagtttcttctttttttccattacacaaaaacgaaaaaacgacaacacaaaaacaaataacaaaatcttttaaataaaaaataaatcgactctcgtgtttgtttaacttcttgtttatttttcttagaggttaattaatttcttctctacatgaacgatccaatgggagaaacaggattttctagagaatcggcgccggagatcgtgttctcggagacggatatggctgcggctgagcagcttatgcatctaagcgaagaagaaacggttagctgtagcagcagcaccggcggagattgcggtggcggaggcggagacaagataaagcatgaatatgttagctcgagaatcggaaacgagctaaacgacggcgtacgaggaaactctattcttggcgtggagaagaagaggaagaggacggtgatgaaggaaaagaagtttcgatctcttgagagtatttacaaagggacgaaggagattagggattaatggaggaaagggatcggagagatggttaattatatatcgtttgttaattacttttgttaatcgatgttagtaacctcttcaatggtttttttggtgtgtgtgtatatttctagtccttgcttaatttaacgttggagctgaaaatttgtgataatagtttttggagattttcagatgaaatctgtaaatattttggttctcatatatattagacgtgatgctgttttttgtttttccctagtcacttcgttgcaaaaattaacaattttactttggttttggatctgatagtacattcatttttttcgtaagatttaaaagtttatttacgtgcaaatgatttcgttttgaatttttaaattttgagttctatgatgtgccaactgccaactgagatcattttttttttaccttttcaaaaagtatatattctacacaacaaaccagacacatgcaacaccaccaaatatcttaaaattgtggtgatgatttttatacttactgcagtaaagaaaaatcataaattttatcatgttcaactaaaggcatttgaagatgcctcatgtgggtgttgagtgaactcgggtcatgggtctttttcgtgaacttctcgttgagagcttcatcttcttaattatcttggagtcatcttctgattcttgtagcttgtattagggtttttgttataccttgatgagcatgtaaagagaggtcaagagtgagtgagttcctatagtaaacattcagttgatcgattggatgtttgtgacacaaaatgtactgtaggagaactagtgactatgtatggaaattgtttatgcattgatgtttagtcatgctaaaaacagatttcaacaagtggtattagagcacaactattctcaaggatagtcaaatttgtaacagaaaagcatattaaggcatgcaagcaatgcaagttgcacaagaagattctattctagtctcgattcttgtaaaatcgagtcacaaaagatcaaggtttcctagtatatcaaggatttcatcgggatataattcctaatgtatcttttttgcaatcatggcttgaacctctagacggttttggcagtatttgtatccatcatttccataccaaatcgtgtttgcctcaacattctacatgtaaattgcactatctgctcatgccttccacaaaatacctaggcaaaagacattaatttttcaagtttacgagcacggagtttagaggagccatcacactgattttacaataaatgaagaaaaatctttttgttatcttgattgacgtctactcatcccatgttttaacttgaaactttaattggcagctaatatctatagtgttatatccacaataggtggaaataaaaccctcacgttccacatcatgttgaataaataaagctgtcatccgaaatagatttggaggtatatagaagttttgactctttgagataacactgtggaagtcaaaaaaaaaaaaaaaaaaaaaaaaaaagtcaaaacatcctcctcgtctgagatgttccatgcaatatatctcttcataattctttcttgtcttcaacaaagtccagcaaggatctgagaagtttgcgtcgattgattatgccaacttgaagttggaaatagaagaagactaggcggaacatctcatcaaaaccctatacattcaacagggaaattcttttgcacgaatgttagacttcaatattgaataaaattcatagtttcaacaatctcataaaaaaagagctgggctccattcgaagacacattaatttccatgggcctggtccacatacaaccatactaaatttgaagtaatttacccgccatttaaaaaagcccataggctccttctcctagaagctggcgggaaaatcccaaaacttttcccgggaaagtagataaaaaatttcggccattaaaggacaaaatcacaagaaagtagaaaccctagagattttgaaaccgaaaccccaaaaacccctttgacgcctccttcttcttatctctttataaaaaaccatttctttcctgcaacatcgttgcttatcatcagacgcacatcacctgttcgataaaattcctctgagagtgttttttttgttttccttctgacaaagaaatatgtatgtagtgaagcgtgacggaagacaggaaactgttcatttcgataagattactgcgaggcttaagaaacttagctatgggcttagcagtgaccattgtgaccctgtcctcgttgctcagaaggtctgtgccggtgtctataaaggagtcactacgagtcaacttgatgagttggctgctgaaactgctgctgctatgacttgtaaccatcctgattatgcatctgtgagtatctctcttcgttttcctttctgggtattgcttgattttgattagtcgtttctggagaagtgatctctgtcattggattggtgtttcatttgattgaattgatctgtataatttacatgttatctgtgttcatatgtcagcttgctgctaggattgctgtgtcgaatctccacaagaacactaagaagtcattttctgagacgtgagtgttgagttctttcttagtgtgtattatacccttgatatgagttcaagtttccatgtgtgttgactccgatggcttgtgtggtatcttgcaggattaaggatatgttctatcatgtcaatgatagatctggactaaagtccccactaatagccgatgatgtgtttgagataattatgcaggtaaagaaatcttgtgttaagctcttgattcaatctgtttcttggtgtgatatatatatatatatatatgtatgtatcttataaatcactgacttgtgtgttactggtttcttcagaacgctgctcgtttggacagtgagatcatctatgaccgtgattttgaatatgattactttggatttaaaactcttgagagatcgtacctcttgaaagtccaagggactgttgttgaaaggcctcaacacatgctgatgagggttgctgttgggatccacaaggatgatattgattccgtgatccaaacctaccatttgatgtctcagagatggttcactcatgcatctcctactctcttcaacgcaggaactccaaggcctcaagtaaatacctatcacttgatatttattatatctattaaataaggcgttttactttgatacgtgtctttgctgatctgctattgaaaataattgaaattgcagttaagtagctgctttctagtctgcatgaaagatgatagcattgagggcatatatgaaacactcaaagagtgtgctgttataagcaaatctgctgggggtattggtgtttcagttcataatattcgtgctaccggaagttacattcgtggcacaaatggaacatctaatggtattgttcctatgctgcgtgtattcaacgatacagctcgttatgttgaccaaggaggaggcaagagaaagggtacgtatcagctctttgtactattagcataatcatctgtccagtatatggtctaaagtgtatctgatttataatttgtaattggtgaaggagcctttgctgtttacctggagccatggcatgctgatgtctatgagtttctggagctgcgaaagaaccatggaaaggtatagtcatagctagataattcaccatatctactccctaaatgtgattaccatttgacgctgatacaacctcttaatacactttgtcgcattgcaggaagaacacagggctagagatttgttttatgctctctggcttccagatcttttcatggagagggtccagaataatgggcagtggtcactgttttgtcctaacgaagctccaggtttggcagattgctggggagctgaatttgagacactgtacactaagtatgaaagagaggtgagtccctatttcatccatgtatatgctgcttctttagtaactcaaattcctgttatctcaatacagttatgtttgttcatatcttcagggaaaggccaaaaaggttgttcaggcgcagcagctttggtacgaaatattgacatcccaggtagaaacaggaacaccatacatgcttttcaaggtaagtaacagtcatcattctgtagctacacgttatggccttataatcattggttcttactccaaatttgaatgctcttaaactataggattcatgcaaccgaaaaagtaatcagcaaaatctgggtaccataaagtcgtccaacttatgcactgaaatcattgagtacactagtccaacagaaactgctgtgtgcaatcttgcatctattgctttacccagatttgtaagggagaaggtgagagggagactggttttttaaaatttgctttctctttattactcaatgtatagctctaacattcttcatctcacaacagggtgtcccattagactctcatccacctaagctcgctggcagtctggactcaaagaatcgttactttgattttgaaaaattagcagaggtcagatacaagcactcgccttgcttgacctgaaatctgattcttaaggaattatctgtggagatatttccgtgtctgtgatgtgatgtttgactttttaatttttctgtgtggccaggtgactgctactgttactgttaatctcaataagataatagatgtgaattactatcctgtggagactgcaaaaacttcaaacatgcgtcatagacctattggtattggtgtacaaggccttgcagatgcatttatcctccttggaatgccatttgattctccagaggtagacttgttttgaattatgatcaatcttggaaaatataattttgttatctgttcttaagcagtttaatttgttactcaggcccaacaactgaataaggatatattcgaaaccatatactaccatgcactcaaagcatctacagagcttgctgcaagacttggcccctatgaaacctatgctggaagtcccgtgagtaaggtatgcatctcagccatcaattatatcaatttggttttcccaaacttcataagctaccattgtggattgttatgctgactttatcccatgcttctctagggaatccttcaacctgacatgtggaatgtaattccatcagaccgctgggactgggctgttcttagagatatgatatcaaagaatggagtgaggaactctcttttagtagcaccaatgccaactgcttcaaccagtcaaatccttgggaacaatgaatgttttgagccctacacatcaaacatctacagccgcagagtcttgaggtatgtgaatattaaatcatttgacaagtatgtttctggttttccccatttgatgcttactcacttggttgtcttggtttgtacagtggtgaattcgtagtggttaataagcatcttctccatgacctaactgatatgggactttggactccaacgctgaaaaacaaattaattaatgagaatggttctatagttaatgttgctgagatacctgatgacttgaaggcgatttacaggtatagcttccacttattttgtgttttcactctctactgtctagataaagaaatttgacttgtttcttctgtaaaacaacacagaactgtctgggaaatcaaacagagaacagtggtggacatggctgctgatcgtggatgctacatagatcaaagccaaagcttaaacatacacatggacaaacccaacttcgcaaaactcacttcgctacacttctatacttggaaaaaggtacaaaccttaatcatctaaactcttcatatgataattgtgaaataggttagagattctatagagtatctgatccttcactcatctgacaattactcttaatctcacttatgttgttgtgaatctaccttaagggtctgaaaaccgggatgtactacctgcgatcccgtgctgcagctgatgcgataaagttcaccgttgacacagccatgctcaaggtagaaaaaacaatgcaaactctttacgctgattcttcttgtgaactcagacattttacctatgagttgttttcgttggggtgaatgtaggagaagccgagtgtagcagaaggagacaaagaagtagaagaagaggataatgaaactaagttggcgcagatggtatgttccttgacaaaccctgaagagtgtttggcctgcggaagttgaagctctaagttatagtttgggtcttaaaaagttagaaagtaaaagcatgtctcttggacggtcttttttatttacttgcttatctgggtgtattttgttaatagtttcctaatgcttaatgttgcttgagtttttgtgtaatccaatttcgtttttaccttttctcttgaaacaataaggatttgtaacgagaattatgtataaccaccaccaccttacggtagattttactatccatatataaatattttaccatccatttataaatatttgtagtttggtactactaccaatggttgtaagtaatctgtaagaatatattctgatcattgtagattagaaaatgtgttactacaggtttcactagcttatcctagaactagaaacatgaaaattatgtatcgaatggtgaaaatattaatacaaacatatttacgtttaaatgcatgtgtacacaacaaagtttctaaagcaagctctatcatatagagaataaagtaaagcatgtagccaaacactctgaaactctgacgaatcgtttatcactgatttctctatcgatagtcccgccttcattgccaaatttaaactcgaaatctctctctcactcactcaatgagcgatttcattttgatctccgacggcgaggatgaagctactccaccaccgtcgaagagggctcgaaagaatcgtacacccacggatttgaacttggataccgaaccatcactgcagaagcaaccgccaggatctgcttctactccgtttttcctcgacgagacacctctctctgacgatgtcactgtcctaaagtcttcctttggttccggaaccggagcttcttcaggccgcgagaacaattttttcggtaagtttgacgttcttaatcgagaaatctctcaatccgtcgttgttattttcagttcgccgacgattatgttgaaatagtttattttatagagaaatttagacttgggggagactgttccacttgttaatttttgtgattgatgatgagtctttcagtttctttgttagggttttactgtttcgctgagtcttttttttttttggaaacctgattaggtaaacgagttatatctcttgaatcggattctgaagacagtcctggacctgagagttcaaaaaagtatgaacctgtttatactgattcttggaagaaaccttgtagattggaatttggatccagtgatgctaattctggtgaggctaactatgacctattaaaatatatccgtcatgatgaaattcgattccaaagggtagtttcttctccacttataaattgctcgtcgttcttttctttcagatgatgatcctagttggatgcggagagctagttttcaatcttcgctgtctaaagatgctattgaggtacttttatctgctaggcattctgcattcataccattttcttcgtgatgtgtgtacatgatgaaggaatagttggctctttttttgtgattcataatgcttttgtttagaggattgggagtatttaggattctcatgggcctttattttgtttatttaggtattgctggttagttcgctcttttgtttggtgcatattgcgttgatcttgtcactaaatggtacaagctgtataatatataaattgcttacgtcttttgttattttgattcacttgcaaaaaatcaggtagattctgaccatgagaaagaagatacaggcgttgagaagatgggtcgaaaaaagcagaccataacttctaaaagtacatctctttctgctgattcattgcctaaaaagaagatgtcaaaagatgaaaaaacccgcgcggcagaggaaaagaagttacaaaaagaagtgagcttcttcttagttcttacgcgacttttctgttttctgttccctggatcaatacttaattagcttccatcgtccagcaagaaaaattacagaaagctgcctcgaaagcagaagatgctgagcataaaaagttggagagggaaaagcagaaatgggcaaaggaaaaggataaagcacttaaatgtattgttgcctggattgacaataaagtgcttgaaggatcttttggaggtaaggaatttcttcattttacttatcattcttcaacatattcctaaagattggctagttcatcactaaagtatggagatttaaggccttcagttattacaggacttctcatttcgggattgaaagagaaatgtattacataccatgtcaccactaatccgattcagagatccattgtgtggacaatgacacttccagaagatattgctcaggtaccataattcggtcaaattttgtagtacaggccaattttaatcaattggtttgcatcttgaatttcataactgcaatatctttgaggacaagtggttcttagaacccagtacttgcaactgttatcaatgccccaatctggtcaatatatctgtttcatatgtggataagcttgttagttgaacatgtgttttttccctgacttatgcatcattctctactgtgttacgaatttcatttcatcatactcttattgatggaagacaagctatgattcctctctcgttattttcttctaacagcacgaggtttgaaatatccgcttaaagtcgaatgtgctctcttttgtgtgtttcagatccaggcatatgggcactgtttgtcaaaattattttgcttgagtggttctgttattaatgtttttttcaaacctccatctttaagaataagatatttgcttattagaaagtaattgatcaaagataacttcatacaacctgtcagggaattgggttacagatgatgaaatattaaatgtaaagaaatgaatcccttttgtgatggcctgtagggccttagaagattattatgtgaatcagctttacctagtatttcttatactcttcatttgcatcttctttgatctattgcagtcattgcctctagggtccaagattccatatgttttactcttgtatgaggctgaagacttttgtaatcttgttgctaagaaagaacttctagaaaacgtctacagagttcgtgacgaatacccatcttatacaatgtgctacctcaccaataagttactgtcctacgtaaacaaaaagtgcgtttgagaaggtacatttttgttgcattaatgtttccatactgaagctaaacaactctatcttctagggaaagggttgagtacaaggaccctgtaaatggctgtggttggagaaagcctcctattgatgaggtactacagttcctaatcaaaatgtgtctagagggaaaaaaaaaaaatccttaatgctcctttgatgtctttaataaagctctgatgtgttacaggcaattgcgaagttatcaactcactatattggagtacattcccggcattgtgtagacgaggctgaggtggctgaccatgttgttcggttaacaagtagtctggcccattgccaagtcaggtattgatatctatgctatttcaattttgtttccaaagattttgattcgatatgatgcccagtggaaattccattttcttgatgaccttgattctgaagcaaaactgtctgatgcgcaggaagaagttaactcggttatcagtatacgctgatggtacattaatgtccaagaatgcagctgataagcacttgattagagagagcatatggtagagtaatctaaacccagtttcaataatctttttagaaatcaccttctttgtttaatatgcattggatcgataggttgaaagtgttggtagcaataccaaaggtacagccaagatacgctatagcagtgtcaaagaaatacccatccttgaagtcacttcttaaggtttatatggatcctaacatatcggtgagttaacacaaactacggatattgacttcttgagttgttgtttctaatggcttctgatgcaaattgtgttgtgttggttaacaaaattggggaccaggttcatgagaaggagtttctactgaaagacttgaaagtggaaaatttagtaggaagagacacaagtgtaggtgaggcctgttcgaagcggatatacagagtgcttatgtctttagatggaaccattaagactgatgacgtcgaaaatggtgctgcttccttcacacttcctccatctgacttaatttagaactagagagaacatcaaataggttcttaactttctatgtcaaacaaaacagaagaatgattgtgtctgagatttttttttgtatatgcatgcaaagttcattatgttgtttgaagtctttaatgtgtgtagtcctgactcgttttctaaagagtaaagataatgatatattttctggcaagtggttttgagtgcttgacttgtagagttgcaattctgttttcttcttttcattacaattctgttttcttcttttcttttcttattgatgatgaaaagctactcatactcataatcaacaggaaaagccttcgccgttgtacttgaaagttttgtattcttctagcaaagttaccatgagatcaatagatcaagaaacctctggaaccaacaacttggaaaacaaactacagtatgacttttacataatcaatcacgctcatgaaaactaaaaacactttttctcgttttggctaattgcttcaggtaggttaatgatatatggcatatgcatgttatgaaaccagtcctcatgagtgctcttgataaatatccatattgcaagatatgtggaggaaacatacttggtaacccatggaaatgtgagacctgccgcttcgagacacatcagtactgtgtggagttggggcgaccatcaagacatcgatttcatcagaaccatcctttgacactgttgacaaagtatccttcacaggaaaagatgaaatgtgacatttgcagagagaatatatacgatttcaatctcttctgccgtatatgtacttttgttatccacatcaactgtgccttgaaaagtaaacatgttcttgaagctttaaggcagaaattcactggaacttggagtttttgtttgggaaagctgtgtcatgtatgacgtgtgaagagatatatcatcctgtgtattgagagctaccatactggttctgtctcaggattcaacacatgttatttccttgtgttgttataagtttaggtgttttactcttggttggttttgtgaaggtcctatttgatcttgcttctctgttttttcatacacagatcctattggttttttaagaggacacagtttgatttggttcataataaagagtctgaatgttaggtttcattgttttctcataaaagacttttattgattagttttctactcaaaacatgtttttaatattacatgactatgacaggaccgtatctgaacatattttacagagacctagccggtaccggtaacaccaagatcctgcttcttgtcgtctttaccagcaccaaagacaggtccgccaagaccagcagcatcagagaccttgtcttgaagcttgtcaacttgaatcccaccttcgtcttcctttgaccttatatcaagcttcgtcttgttctgtcctccttccactgactcgtacgttgtcgccgttcttgaatccatcggctctgctccttgtgctcccgacatcgttgatgataccgatccttcttaactcattttccccttttgtccacaaaacttatttatgccctcaagccatggtcttaaaacctgccaccttgccaagacgtggcagttcttcagaagtctagacctatcttgttggtcacgtgtcgtaagttagccaaaagaagtcgtctttgacccttatcatctgttggatttatgcttcttgatatgttatcgaacatgcttatgaataaagaactgtctagtgaaaggtacttcacactgagaagactcttcatcaatttttaagtttcatattcaataacaattttaagtatcattattacttcaattaccataatgataccaaaaaaaaaaaaatgggctcaatagaatccaattaagcatggtcagtaaacgaaataaaaaatattaaattttccaaccacaccacgttgagaaacaattattgagccactaatttattactctctctctctctgtcgacctcacaattagttatgcttttgggattttgaatcatgaaggttctttgatcaagattactgtgttatctaatggtactcttagatcaagattccaatcttgcttcttccccatgggaaaactcgagcatttctcccactcatgccctttgacctcgccggagattgtagctgaaggcatctgcaacatttgcttccaagaccaagttgttgaatacgcatgtaagccttgcaattttgatatatgtaagacttgctccaagctgccgcaaaaggtgtcacatggttttcactcagatcatcctcttgagttttctctattccaatatgatcgaaaacctggttacattgtctgctcttgttgtgggaacatgtcttcttgctcattctatgaatgtaaagaatgtgagatctatcttgatctcggttgtgcactactgaagaacgttttcactggttgggacgttagagaaatgcttcattacagtcatgaacatttgcttcgaaggtgtaaaccaggacaagatgctagaggctcttgcctgctttgtgagctccctctttctccctcttctatatgttacggttgtgtttactgttactcgtttctccacgagcgctgtctcgatcttccgacagagattcgacatcccgtgcatctggaacaccctctcagacgccttgattacatacgaagtggtggtcgaacattttgcggtgcgtgtagagagaagattgacagtgtcccctttggctgcctagaatgtggtttttacattcacatgaggtgtgcagattcgtttttgcgctgtctgatgcatgaatctcatgagcataaattgttttatgtatcttcgaatgctaaagaacattttggaagaaacaattgttgccaaatatgcttgggagctgtagtgagctctctcgattcttactaccactgcatcgaatgtgaattggagtttcatttcgaatgccttgggatttccaagaccatttctaagagatcttgtcacattcatccacttgtttgtaaaagagtacgtgaagaggatgattctttggagtactgtggcgtttgcgagacattgattcatgccggacatcatgtttattcgtgcgaagaatgtgattttcttggtcacattgaatgcattctacgcgaggtaatcaatatcgtttttgtgtttttttgtttcttaataatgatgcaatgctgatgatctatatctacaaactacagaaagagccatcaccattgtacttgaaggatctgtattcttgtgttgaagacgtcaaaagagcaacaaaccaagaagactatgaaaccaacaaagttatggtatggctttataattatctatcagtggaagaaaagtatgaacatcattttaagccagccttttgtctcaaacgtgtaaggtatatgttgcaggttcatgatatcaaccataatcatgtggtgacatcgattgatatgtgtgagcttgaaggcaaagaacattgtcacatatgtgaaaaagaaatacttggtaatccatggaaatgcgagacttgcaactttgtgacacataacttctgtgtggagctagggaaaccatcaagacatcggtttcattggaaccatcttttgacactcatgccaaaaccagttgctacggatatgacgagttgtaaaagctgcagagaggatataaaagggttcaatctattttgtcgaatatgcaattttattatccacgtcagttgcgccatgaaaggtaaacgttttcttgggatgacaggaccgaaagtcgttggaacttggagaggacgttgtttgggaggcaagcatagaatggtccaagttatgttcccgaggtcatatcaaaaagtttgtattatttgtcatgagagggtgcttgggaaggctgtgtcatgtatggagtgtgaaacgatttatcatcttcggtgtattgaccgacatcgtatcaaagaccgtgattcttcgtagttaggttgttcctcctctgaaactaagttctgcaacttcttgttatgttatatacctctaaaattttgtcggttagtaaatcatgtttgtaatatgtttatttgctctgtttatttcttgttctgttttctttgtttttggcacactatgtattttcaatcctctgttttggattccattatcgtttttccagttccaatggtgtttttcttatgtaatcttggtgacataatacacaaagttcagtgtttccattggaaaagccagcggcccctgcaggtgcaggagttgttatgaattgtaacatttgcatgaatgatatagaagggttcaatctcttctgtcgcctatgcaattttatcacccatactatactagtcataggtcaccaatatattgtctgctctggttgtgggaatatgtattcttgctcattttacgaacgtgaggtctatcttgatcttggttgtgcctactgaagaacattatcacaagttgttagagaaatgcttcagtacagtcatgaacatttgcttcgaaggtgtagaccaggacaagacgctagaggctcttgcctgctttgtgagctccctttgtctccctcttatacatgctacggttgtgtttcctgttacttgtttctccacgagcgttgcattgatcttccaacagagagtcaacatcgcgtgcatccgaaacaccctcttagaggccttgattacatatgaagtggtggtcgaacattttgtggtgcgtgtagggacaagattgaaagtgtcccgtttggttgtctagaatgcggtttttacattcacatgaggtgtgcagattctttattgcgcagtctgatgcaatgaaacggaaagtttcaggaatatttccaaccaactaacaaacaagtcttccgctgtttcatgacaaagctccttccctcgaaaactcgtcatgggaggcaaattaaggcttctcaggaatccttgcatccaattcgaggcaattctacgtttctgtagtacaaaaagagagaatgattctttatctgtagtacaaaacgtcaggcaactgcagcttgttctcaagcaagcatctcccactgtattcacacttacaatataattcctcaaagcctgttcattcaatatggagaagactcaaagtaaaatcacgttcctgacgttttgtcggaaattccagatagaagcttaagcttcacactatatctatggttttccgaacacaaaagcttgattatgcgaaaaacaaaatgcaagtattttctcgaaaaagcaaaaataagaaagaaacaacatcaaaacaacaatattccacacaaacaatcagagaaactcactattaaatcaggtatacacacttgaaaatcattcaaacttggcaatcagaaccacaaatccaagatccaataaataaacatgttgcaaatttagttcaccaaatgactaagttgaagatgatagaattctgaaacataactttagttcactgaagttgcatttgagagagggaggcataacaaataagactcatcagagccaagtcttcgaacacgccaccttttattgttaaaacacgataagaaaacgagaagagattgaggcataacctcagataagggatttttccgtattcagtttcataaagggaggcagaaccaaactaagaggaatcgtcactggctttgaccacatgcatcatcatctgttctcactacaagaagaaaatgagatgattttgaggcataacatgatacgacggaacttgtggttaaattcagagagggaggcagaacactacctaaaaggtcaatgagatcacgctcaaggtgcataagatagatgtctttctgttgtttctcttctgttgtttccctacggtcatcctgtacgaatcgggaaaaaaaatgatgaaattcgaatattatttttgataaaaaaaatgagagtcggttaactctttaccttagacattatcctttcagtgggaaaattcctatcgcaaggatagcatttgtaagatatacgatccatgtaattgtcacggacagaccatttttccctgtgagaagtgtatacttgtgtgagagtatgcacatgccgttggttcctcacattagctggaaacccaatacactctacatgggcgttgaacatacagtcaatacatccgtagaacgacacaccacatggtctagagcacacaccgcaagctcgagtcaccctcgaatcattgttccaaaagttatagaaatagtgactatgagacttgatctttcttggtactatcactgctttgatgcattcaatatggaaattgatttcgcagatggtacaatgatagccatattttgttatattcagttggcaggccgtgcacttggatccacttttaagtgaaattgctagcatgtgatcaacatgaagtggatgaccaactagaattcgcctcccaacttggatacacatagggtgatatatatcttcacacgtcacacatgaaaaagcctttccacaaaacttctcatcacaaatagaacaagtgataggatatgaccgtgaaacgataacttgaaacaagctatgtttgtcttgtatgcaaagtcctaaccatgttccaatgattttctgacccctttgtaatgcaccatgcatttttttatctttcaaagcgcagttgatgtcgatgatgaaattgcatatacgacagaagagattgaacccgcctatatcgtctttgcatgactcacacttccttctaaaccatctaggggtatttggtagaagggtcaaagaatggtttaaatgaaactgatgctttgatggtcgcccaagctctgcacaaaaatcatgtgattggaagctacatgtctcacatttgcaaggattatcatgtatttttgtcccacacatgttgcactttccttcttcctcaagctcactcatgtggattagtttcatcacatgaatatgactgaagctattaacctggagtatatatttgaaacaattttaggtgaagacattgtttcactagtgtactgattataataaaaaggcataccagtaacctatcttcaaattcaatggtttcaagatgttgggattttgtgttgcctttgctgcaagagtacaaatctttcaagtacattggggaaggcacttcctgttggtaatgagtaagaagagtattagctcatatcattttcgtcaacggatatcgtcatcattataagaaaaaataaagctgtaataaaaatattaattacctcgcgtagaatgcattcagtgtggccgacaaaatcacattcttcacaggaatattcaggatatcgtgaaattaccatagtctcacaaacaccacaatactccaaaaaatcgtcctcccctccgactcttataaatctaagtttatggatgtgataggatttcttgatcacatattcaggtatctcaagacacttggtatgacatttcaaatcacattccacgcataaataatagaatctgtcatagaccacggtttccttgcatattagacatggttgttttactctttcatcagcaacacgacgagtactttctacataaaatagcctgtgttcatgggacttatacaacaaaccccgcaacaaggcatctgcacatctcagatgaaggtaaaacccacatcctaagcaaccaaatgggacaccaacaaattggccgtgacaggcattacaagatttctcaccgtcaaaagtttgtatataattaaggcgtttgagagggtgcataggatgcacgggatgttgaatctcggttggtagatcaaggcaacgctcgtgaaaaaacaagtaacaatgaacgcaaccgtaacatattgcagtgaaggagagaggttgctcacagagaaggcaagagtctttggaatctggtcctggcctacaccttttaagtaagtgttcatggctgtaatggagcatttctttggcttcccaactcgtcgctatgttcttctgaagtgcacagcccaaatcgaggtagatctcacacttgctacactcgtaatagtatttggctccagaagacatgtttccgcacacgacgcacaccatgtgtttagtcttctgatcatcttcgcctatacgaaattctagagggtgctccggatgaagatggtgtgacattttctggggaagatctgagcaagctttgcagagatcgaaattgcaagggtcacaggcgaattcaacaggttcatctttgaagcagatgttgcagatcccgtttgcgacgatcccccgcgaggtcaactcgcactcatgagatccatgttggagctttcccatcgagagcaagaaagtcaaccaagaaaacgttcagaattttatttacttctccgctttgatttaaagatttaaaaacgttttccaattatttgtatgttttgattcgagcttcacttttgggagttcgggtcgggtcaattatgggtttggatatcgagtttacttacgttttaaacgtaaattagattttaacccgtaatataccgcaatttttgttttttattaaaaacaaacataaaatttgtcgtaaacatgaaataaatttgtttattgtgccccatatcctctactatttttttaagccaattgatattactttctttctttttactagtttcaggtaataagtgttttctatgttaatctagttttcctccttaacctctttttgttattgtttaaaagaattgtgtaaatatctatataaataaatatatatatatatatatattaattataatctatggtataccgcgggactataattattttttaaaaaataaaaatttaatatgtttagtagattaaaaatatatataatttatttttttgtattttctaaatgtacaactcttatatctatagatttttagtatacaattactatgtttgatttttactttttaaaactatagaaacaatacatacagttcattaagtcaaaatctagtttataactacataatttaaatttaaattatatttatttaattaatattctttaatttgtttagtgtttaagataatataattatattttaattgttatatctaagatttcatctgtagtatactgtctcgtattactatcgatccaaacccgtcataccatctaatcccgttcagtggaattaaacatatttaatggatttcacccgtggtataccgtcttgtattactatcgacccaaacccgtcataccatctaaccccgttcagaaaaattaaacattattttgttattttgttttaataatattttagtttaaaagatgtataattcaaatcaatttaaaagttttctttcttcaaatgattatttaattgttgtaaagtatatatataataatattataaacccgtcctaccatctaatcccgttcggtgaaattaaacatttttttttaataatacttttataaaacaattataattcaaattaatttaaaattttcttatttaatttttaaagatttcacatatttaaatattctaaacgtttaatatatcacaattttttaacatcattatataatatataaagtttttaaaaatctcaaaaaacatttccgtcatattttgtgattcaaaattttaaaaatgaacatatattaaccaattggcgaaaaaatgtgtgggttcaacgtcgcgcatcgactaaaatatttagacaatgattcataaacatatcataaatgatttttttttacaagacgggtttggcaggacgttacttaataacaactgtaaactataaaataaaaatattttatagatacataaaatttgtaaatttttatatatactaactttaaaaaataaattgtacccacagtgtaccgcggttaaaatctagtatatcttcgaagcccaacaaactaaaaactataaatatttggaaaaattataaaatttaccatattttctcaatttcttatgcaatttaccataatttttcctcccttacacatcataccacatttccacttaaaatatctatattgccctcaccatttcttctctattttgtttctcctttctcgagatccgtgcgctttaaccacacatcactatctttccgaagacaaaatgaaacgtttttgtctctctcacttctcctgacaacgtgcacatattctttacatataacttttaatttattttgtcccctaatttctattcatcataaattttccgttatgtctagatcttgtctccgattttcaccatctttcaatattatcatgaatcccacattttatccaccaattattctcatttaaggtttctaatttgatttagattttcaccatttattttggtccacagattagttgagcattattgttttcaccgacacgatttttttttcttctattgtaaaataacaaaaacatccagttattacatatcatcttgtctattattcgatctgaatttgtccccgatctaattctattactcattcgatatgaacttgtccccgatataatatattattaaaatatgtaaacgtgtaggtgaagacaataacgctcaactaatctgtggaccaaaatagatgacgaaaaatctaaataaaatttaaaattcttaaatgagaacaattgcatataacgtgtaggattcataataatagagcaagatgatgaaatcgaaaacaaaacgtagatgcaacagatttctattcggggacaagatctggagactaaaacaaaagtctgtcaccagttgtactccgctaacaggtaattatgtcccctaatgcattatatattacgttgtcccccgctagcaggtaatcacatctcctaatgtattatatattacgttgtcccccgcagaatttctccgctaacaggtaatcatgtcccctaatgcattatatattacgttgtctcccgctagcaggtaatcatgtctcctaatgtattatatattacgttgtcccccgcagaattttggataaccaatttttttaaacaagtcaattttaaatacccaataacagtagaagccagctgttctccactattctctctcctaatcttttatgtttccaccatgattttttgtcatgtatcatcacatcagttaaaagctgtcaccatctaagtcagtccctgacccactttaagggcatttttgtccacgaattaccaagtgaagtaaaatgtggtagatattgtaagctgaactagaatatggtagaaattgtaagattggaccaataatatggcagattttgcaaaatttcctacatatttcaagcttctacctctagttcactactttcgttattaaataagcccaattactctcacgttactattctacatgtgttatctatatttggttaggcagttatcaacgctttcacgacattgtaaaatttttagactgaatgcattccataaaatgatgtttaatttgagaccgaatgcattccataaaaattgaaacttttaaatatgtttttaattaaaaatattattaaacaaaaaataacaaaatgctgtttaattttacgggacggagttatatggtggaacaagtttggattgatactaatatgatatggtataccacaagtgaaatcctaaatttaaaacaaaaaataaaatgatataatcttaaacactaaacaacccaaataatactaacaaaacaaatacaacttaaaatttaaggtttttcattttaaaaaatcgatcattaatgtacagtggagtaatattttagatagaaaataatatcaaattattattatagtccatgattataaatatttaccaatattaacactatatcacttctacacctacaaatcttctaagtacatcaatacaattaacacatttatgtaacaaatacaaaaactcaggaaacaatctttttgcatttcaactatattaattctaatataatataattaaatgagaaatatgtttttacattatgaatttaaaaatccaataaattattaattattatctaaaatctataaaataaaaatattgtcatgcggtataccgcgaattaaatcctaatagaatactataatcaatgactaattaacacatcaaatgaatttgcttcatttacatatctttaataaacgttactataatattttatattaaaatttatatattaaatatattgtgtctaatattaaatatgattgaattttatgactacattttttaatgatatattaacgtatttgcaacttacagtatgtgtaccccgaataatagcatacgatattttccattgtagattacgaaattctcatatttaaactcttctcttgtgggtagggttgtcaaaatgggtcaaaattcatcggtcaactcaactcaattcatgaaccctaatgagttgaaaatattgactcaaatgagttgatgggtcaaatgagttcttgaatcaattagtttgatgaataaaatgagttgagttgtaatggttaatagtttcaatggtttatccaattaacccatcaaattttgtaaaattgaattaaaccaactaaaatctctaaaccaataccaatttaagtttaaccaacacatctaaactaatttaataaaatcaatattttccaaatttcttaaatatacaagctatgaaattgaaaagaagtaaactcgtaattttccaccaaaaaacataaacccgtaattttcccgccaaaaaagtaaacccgtgattttcccgccaaaaacgaaaaactcgtgattttcccgccaaaaatgtaaacccgtaattttcccgccaaaaaacgtaaacccctaattttcccgcaaaaaaagtaaacccatgattttcccgccgaaaacgtaaacccctaattttcccgctaaaaacataaacccgtgattttctcgccaaaaacgtaaatccgtaattttcccgccaaaaatgttaacccgtaatttaccggccaaaaaacttaaacccatgattttcctgctaaaaacgtaaacccgtaattttcccgccaaaaaagtaaacccgtgatttttccgacaaaaacgtaaatctgtaatttttctgccaaaaacgtaaatccatgattttcccgccaaaaacgtaaaccccgtaaaaaatggaatccgaaaatatcttaagtttgatgataataaattaataattattaataatgataattatttattattgttttataataataattaattaaattattacgtgggataatctatttaacaactcaactcatcaaatgaaatgagttatgggttgggtcaacccatttaatcatttaactctaaactgatttgataatgagttgagttgagttgggttacccatttcgacactcctacttgtgggcttagtgaaatttcgtagatgtatatgtaagcccgttaaacattgtatacgatttaataaaacagaacgacttgtttcgtgcactcctcccactatcttaaatctaaaaaaaaaaactttggatctcatctctcgttgacttcgatggcagagctcaagcatttctcccatgaatgcccattgacttcacccaagatcgccgtcgacgggatttgcagcatttgctacaaagatgaccttgtcgagttggcatgtagcccttgcgatttcagtctctgtaaaggttgctctcaacttccgcagaaggtctggcacgatttccatccggatcatcctctggaattttgtctgcaccagtacgatcagaaacctgaacacgtcgtatgctccgggtgtggcaacatgacttctggctctttctataagtgtaaagagtgtgagatatacttggacatgggctgtgcgctcattgcgagcatcttcaggggctgggatagcaaagacttgctccattacagccattgccacttgcttaagaggtgtagacccggaccagacgctagaggttcttgccttctctgtgagcttcccctctctccctcttccgtttgttatggttgcgttcattgttactcatttgttcacgaacgctgtattcattttccgagagagattgcacatcctgtgcatcttgcacaccctctcaaacggcttgattacacacgaactagtctctgtcatatatgcggggaaagtatcgctggtgtcccatttggttgcctagaatgcgattttgacgctcacttgaggtgtttagattcctttttgcgagggctgatgcacaagtctcatccgcacaggttgatttatagaactaaatctcacataagtttcacagagaatgatcaatgtcaaatatgcaggagaagtattgtgatatctcttgactcttttttttactgcatacaatgctctatggttttccatttcgagtgtcttgagatacctgagtttgtggtcgagaagtctcatcacattcatccacttgtgtgcaaatttctcccatatgaggatgaatttttggagtattgtggcgtttgcgagacaatggtgtatgcaggacatcatgcttattcctgtgacgaatgtgattttctaggccacattgaatgcattctacgcaaggtaattactgttttcttattaatgatgttggtggtgaaacgatgacgatttattctttattataatctacaggctgccccttccccactatacttgaaagatctttacccttgcagcaaagacaacactagttcaacatatcaactggaccatgataccaatgagccaaaagccgaacttatggtatagattttcattacaactgatagactagtgaaaaaatcaaaaattgttaactcttttcattcatatattggttgtgactgcccttcccttgattaatccaggtcaatactatgaaggggcatatacatgtgatgcgattcgttgatttccgtgagcttgatgaaaaagcaaagtgcaacatctgtcggacaaaaatacgcggtagcccatgtaaatgcgagacgtgcagcttccaggcgcatagtttctgcgcagagctagggcgaccattgaagcatcgagttcataagcattttctgacactcttaccagatgcccctgcaggcacagatgttactatgaattgtgacatttgcagagatgatataaaagggttcaatctcttttgtcgcatatgcaattttgtcatccataccaattgcatatttagaggtaaacacttatttacggagtcacaaagggggcaaaaaatcattggaagctgtacagcgatgagtggatgcattcaaaaagagcatttgttggatcaaataatggtctcaaagtcatactccatggcttgcgatatatgtgaagaggtggtgtgtggaaaagacaagaccatacatatgtcatcgcttaggctttcaacatttgtgtatcgtctgatcaatgaaagctcacttgtttcatgtgtggtgtgtaaagatgtatatcatccattgtgtctggaagttaacaggcaaatgagattctgtcatccaattcatcctgatcactaccttccgctttcatttgtaagtggatccaagtgcctagcctgcaagctggaaattaaaaagtatggctatcattgttccacttgcaacatcagtttccatattaaatgcagcaaagcggtaatatttccacaacagacatctcacaaccaccgtttctatcacttttggattgctgactcgaagatcactcgaacctgccgtgtgtgcgctaaaccgtgcggtgtctcgttctacggatgtattgggtgcgacttcaacgcccatgcagagtgtattgcgtttccagacaatgtgaagaaccaaaaacatgagcatactttgaagctaataggtagtcgttatttcgagccagattgctttctctgtggagagcgtattgtgggtaaattcggaaaaagctccaatgtgctttattcatgcaagcactgtggcaaagagtttcacctcaaatgcataatgtctacggtaaaatttagtcaaccatcttgcagaactttaaccattaactttttccgttttgttttcggttttcaaaacatttaaatgtttttttccgtgtcatacaggatgaccgtgaagctgcaacagaagaggatcaatatggagacatatatcttatgtaccttgagcgtcatctcttggaggtgttataaagtgagtcttagtttggtaacgcaacttttccgttattctgaagttatgcatcaacttcttctcattttattcttgtctttgtttcaacagaggatgacgaagacagtgattcatcttagtttggttttcgccccctccatgtgtaaactaataaggagactacttccctcatctgaggttatgcctctttgcttgatttgtgtttactttttcagagtgccaagtttgatgctagtagtgcctgtgccactgtttttctccaagttgttattaccgtgtactacatttcaaaaaacgtttgcatttttaacgcgaatttcttcctatctttcgcctcctcagggtttaactcaatattggattcaatgatattcttaaacaaacatgaatttacagaaaaacagtgactaccacagtgcaaaattagttgaatttttcttccgagtctggttcctctatgatactgattctcgaatgaagtctagaaccctgtggaatccctagcggcgggttttcacaagaacaattatcaacagcaaagagttcccattccttaatcccacatttctccaatgctgactgcaatctctccttgtccttctctgccgggtaagaaccatccggtgtcacaagcacagctccggtgtaagactgtcctgctacacgtgctgctccatggtaatggaacagtccccaacttagatcatcagatacatccacaatagtccaaaactcatttgacaccacaccattgtccaaaacactgaaacgaaacgttgcagggatctttcctcgcttaaccgagtatcttctccttctccacaccaacttctcttcgagcgtcctgacctgaaacacgggctcataccaaaacgacgacttccctttccctctgtagaatagctggtactgacatggaaactgatcataagccgggttttgtccagccacgacacgccagctccattccaattcccctaaccacccaacaaacaagtcttccgctgtatcatgacacaactccttccctcgaaaactcgtcatgggaggcacataaggcttctcagggatctttgcatccagttctaaacaattgtgcttctgtagtacacaaagagagaacgcttcaaagtaaggaccctcataagaagcaatgcacctgtagctacacacctgatccacaggactacattggttcaaacactgaagagcttttcgacaattcggatccaaaagacagttcaaaatctgaggtccacagtttttaaccatgcaactaagcgtcgaaaaacctttggacctcaagttttgcaacacaggaactggtcttatataagcgttgatgatcacgagcaaacaaaaccttatatcatcagagttacgacgttcccaagcatctcccactgtcttcacaacctctgttacttctttatctttattcacacttccaacatcagtccctccaagcctgttcatcaaatttggagaagactcaaagcaaatcatgttcttgacgtttttgctgttagtctgaatccaattcacagattctgagttattaacagcaacgacaaccaagatatcagtctgattcagttcctgtgtcagattcatagctctctgatcatttgaactcacaatttcatcatcaaagacgagcatttcatatccttcatcaacccatttcaatcttctcgcctgttaatgtaagaagaaaaacgatacagaaaccgaaatgtttaggaatttgcaacaattgttaagcgagagagaagacaattacttacagtgtggagcataacttcttcccaagaggtggatttgagtgggcttacttctccttttccgacgagagcaatcaatttcaccggaggctcaggcttctctattttcgtactcttctccgtctccaaaacgcgaacaacagtggttcgtccccgtctggagaacgatgcttcatctaaggaaggatgaaacttccggatgaaattaaccggttgatgagtgacgaaccggttaaggaagggagaacactctctcgttccaggaagagaaggagctttgagaggaatcgccgccatggcgaagaaaacagttgttaacgtctctcagacaaacccattataattgttcacagacaagccacgtgttcgatatgattggtttaattcatctagaatgtatgatactccagatcccatttcggttagatttggttcgaatttggtctactaaatacaaaactataatagtttctcgggttgattttgcttgccacgcttttgtttcgaattaacatcacaacttttattaattatctcaaattccagtgatcaccattatcaaaaaaacatgaaacaacgtttgtgtctaagaatctcaagcgtaataaccacagagagagttagactcaaatccaggtgagagaccttattgaacgccaaaccaaaacagcagcaagggaacgatcttctctttcaaagacaatcaagtgagagatctttgccttttcttacaacaaatcaaatgtttctaaggatcaaaccttagatgaagttacggatgtctagagacttcacgtccggcatttcctcatcctggaattcctccctgaataatccgcaagttccatcgcgttatgacatgagtaagatcaatgattgataaattgagaaacaaaaaaagtgaaaagaaaacaaaactcacttctttttctgagattccatagcttcaacagcatcactcttcagctcatccaactgtgctttggccatgctgagctccaaattttcttcgtacttaggaagatcttctttcctaatcccaagcctgtttagattaatgagacgcaaacatgcaattcaattagctatcaatatgtaaatcgatatacatataagtagtaatgagaatcatttgttcgtgttttgtatggatggttgaagaatgatgacgcactttttgttgcctttctcaaactctgcaaccaaaagatccattcctttcttgtcacttctcaggagaggcttctttatgtccttctcgactttctccaaagcctcgaacatcatggcctcagcaccaagctcatcagtaagccccctcctgcaagatatatcacaagtgggagtataactaaagactgcttccaacaattcttcatatgttgcaaacaatagcagatcaaagagggagatgaaaatatagatagttaaatgcagtcttcagataactgcttaacgatcacattcaagatcttacaggaagataattccaatattataataacataagaagagcaagtttacgggtgagggaaaactatcctaagataactgaaaattattcaaagtctaacagctacctggtgcgaatttcctgcaacttcaacaagtatgcacgagcatctggaatgtcttgagtctcagtatcaatgtcatgtttaatgcgctgagattctgagaacatgtctgccctgcataccaaaaaaacggatgacaagcaaccaaattaacaaggttaaaatagcagcattgacacatatatttaactcgtttcagaaaagtcgaaaagtaaaaccaatcccaacaaacagaaatagagatcacgacatacaacattcaagctaaataacaaacacctacaaaagagtaacaagaggcctacttttgcctgatggtcttcattacatttgcatactgttttacggcagctgggtcctctggatcaagggtgatcttttccttacggagaatatcaacagcagcctggaatttgttcttgatatcaaaaaagacacccttcaacatctctgtcaaaaagtgtaaaacttgagtcaataatagtaaacagcaatgcttcttcactctaaacacatagtacagatttcagcaacatattaaacataatccatcataaactggatacatataaaactcaacaaaagaagtaagcagaacaacagtcctagcaatcatggcctgggtttcacaagattatattacattgaccaatatagtttttctacacattcgacataaaaaaagtgacttgacatattcttaagtagtcacgatgttaaactcaaaagcacgaagggctaaagaaaggaaagcaactgttttcaactaggtgtgttattgaaaacgtaatgttctatgcataataacaaatccgaagtatgagttttggtcactaaccatctcctttaaaggttggacgagcagcttccttagcaaaagctcggactggaatagcatgttgctgctgcaaaatgaccagacccccctgtagctgcgtaatgagagtaagataataaaaattatggatcaataacaagttttgatgaaaagaatacttcttgcaaatcatcttatcatttcgaactgtattagaaatcaacaacgagtagaaaaaaaccccatcaaatttatcatttgatttcaacaaactctccgattgagatcgtacgaaagataacaaaaattcgactacgatattgaaatggcacaccctaagatgtgattcagtgatagagatacagtaaaatcgataatctcactctaaccatcgcatcgaaacacataaaacccagaaatgggaggaaaacaaaaggaatcaaacagaacgaagaagagaatcagaaaaatcgagggagagagagtatatacctgcttagatctggagagaaaacgagaagcgtacgccatttccttgatcgaatcgagtcgctgtggagttgacgaaatttagggtttgtggtgtcttgttgagatcctatctgagcgacggagcagaacaagtaacaggcaaaggcagtaattgtacaccgttgatagtaatcaacggctgagatttattcccaatacggaatatctgaaaataatttgattttattttttacaattacactatgaaaatcttaatttttctattttttttttttaataccttttttcgatcggtcaacttttccataatggaagtaactaagtgattacaaggagagttcttgataagtgtcagccaagacattgtcatttctactaataagttgaacctataggaaatatttgccaaatgagacaaggtgagggattactccaatgtctagtagcggtttcaaggtatttataaatagttgataaatctccacagaatataacatgatcatcgaggtcggtcaaaactatatggatacctaaagcaaaaataatttggtatattaacataaatagtcaaaaaaaattataagtaatagattcaacaataattagaatcaaaactgtgactgatcattgaaaactgaaaaggttcggacagaccattagaccatttatctaaagctcttattattactgttacctaaagcttttgtttcatggactttagtcacggaccggttttgatgatcaaattgcaaccattttagttggagggttgcttcctttaagactagagcctctccttctgcgactgaaaaggtggttcttttaacgtttatcctttgagagcatacatcttttctcccattttttggttttcaatatgttgaatctattcaatagtgtttaatccacatatgattttttactttttcaacactctcatcgtatgtgttcaacagttgaataatttattcaacactctcattacatatagtcttattatcaaactcatagtttgacatatctcagtcatcataactcacaactcagacatagcaaccctcaaactcatgcttgcgcatattttggtcgtcgacctttaacccccccccccccccccccaattccatcacttatcttctccttattcccatgatcatgcaatatacattactagccatttcgttccaccattgcagtccatgtactttcgccatttttacagtttaacaaatcatgtattactttcccgattgaatatttttctataaacatttgtcccactacatatgcctcctgatgatctccaagtactctctctagaagaatcacattcactcatctttccaagctcatcatatgtctaattgggaattgcttccggacttggtacaaaactgaccatgctagctagttcattaagaatttgtccatgtataaagaacttgataggaggaatcaagcccatcaagacaataccatgagttaagttcggtttccaacgtttaaacctacttttgctacaccaaaaattatgcaatcaacttgtacataattgattatcggtggataaaaataagatatacatgttgcaaaaaaaaaaaagtaagattttactctaaatggatcagagaaaccacatcttcaaaagacttgatagaaatcccatactgagaatgttcagtgaatgtcaattgatttttgagtcggaaattcacataacgcttaacaaaatttacgtttgaaaatgagttgcaactaaaagcgaaagagcaaagttggttgttgttttttggtttaaaaacaatgttcacaagagataacaagagtctcttttatgacatccaatacaaatattattggttagagtcaataaaaaagagcactaaggagaaatacaaaattggttgagcctataaaagggagcattaaggagaagtagttgcgcagaggcggaaagactctacaccaaaatgtgtttgttttttaatgccacacctaaacgttacgctttcaaaaagaataatcaaatggagtactactaatagacatatataggtagaacaaatccaagtgattcggtgatggtactataagttatctcaacgaaaaggtttacaaaaattaaatagaaattaattaatgctttacatgaatcaaaacactcagaaagtagtatgtatcaactgttttttgtcgttaataaacctctataaatgatattattaaaccaataaatagaaaaaaagttaccaaaaacaaggactgcaaatgaaagagctgggactcgatattatttgatcagatatgtcaaacatggaatcagcaagcacaacctcttgactgatctggatcaataatatccgtaacagagtcatgatactggcctctaggatatctgcaaattcaaatacaaacaacaattcaaacatgaatcttagagaaaaattggaaagagttagatctatatagaaactcacatgtcattgctttgtttacgttcattagagagagcaatgtgtgcaacactcaaaaaagcttcatcgatattggtatcttccttcgcagaggtttcatggtacggtatgtttccctttgagccacaccactcgatggctctcttatttgaaacctgcataagttgaatcgggaaattagggtttttgatgggtttgaagatgagatttatgaagatcatatcggcttacaactcggctgtttccgccatctacatcggtcttgttcccgatcaaaacaaagggaaatgtctccggttccataggatttgcctagaggatatcagaaaatggaatcgaagcggttagacttggatggtaactgtaacttcttgcacacgaaatggaacattagggcaaaacctgtttgaggaactctgtgtgccagttattgagagtttcaaaagatttgagattgttcacgtcgtagacaagaacgcaacaatcagcacctctatagaacgcggcccctagactttgaaatctctcttgtccagcggtatcccatatcttagaaacggagagtttcataatatattggcatcaaaaaattatgaaatgtgaaataaagtaaagatgtatatcaatttacctgtaaagtgacagatttttcatctatatgaagctctttggtgacgaaatctgctccgatcgtagccttatattgcttgttaaatttcttgtacacatatcttaagtcgcaagtcaaggttaccgcagaaacacagatctaacacagactattcagagattgaactaaataaaacaaacctaaatgtgttactaatttataagtttaaaggtggattttaacaaggatactgattcatcaatgaagttttgcctaccctgcagatataaacaaagattcagaaccaaaaaaaaaagaaacagaggcaagatagattcttaaattttccattttaaaagaacataaaaatcaataaacccttgatttgtatggttatcaagaacaagagacaagtctagaaattgtttaaaacaatctaagaaattattacccgctatctccaagaacaatgaccttaagcaatgttctattcttcaaagaatccattgtcagaagctcaagaatctacgagattgttctctttttatgccaataaagtttctttatggtttttggacagagacaagaagtctacgagattggtcttgatgatcttgcttcttcttctgtcttctgggaggaaaaaaaggaaaaggacaaaagaagaagaagttatcacgtgttattatgatattggttgatgtgaagagaaaccatgtgaatcctttgccaactaaaagcaaatagtttggccaagccagcgaatacgaatacgaatctaaaaatccaagtcccttttttaattcaattgttattgacaaaaaaaaatagacgtcagtatttatttcttcttgttttcaatcattgattttacaggagaattgagttgtcttttgtttttctgacaattgtcaattaaattgtgtctatatttggcccctgagtcattagtaattagcggcaaaataatacttaatttttgtttaaaattgcaaataattttttttatatgatttttgtttgttgcttttggccaatgactttaaaagtcaatgaatatagacgtgtggacatctcgcttatatagtacagtacatatatgagccaacaataacattcatagtcttggtaacattttttgttttcttctttttttggtatcaaattgtaattactaaagccttagtaacatttttaaaatgtaaattatcgttgaaagtttcaaaaatgtaattattgactatttgataaaaccttcagataaatgatatcatatcatatgagaggatcagctttgtaattttcctttttatgactaacagagataaacgaagatgcagcgggagaattgtgtcagtttctaactagtagacatttttttgtgaatttatcagataagaaacagaatagataattaacaggtgtttgcccaagaaaaaagataattaagaaagtgaaaactatgaaaaaaatcaattaaataaaaagaagatattagataatggagatgtcattttgacatttattgataaggtgtcgaccagatcgtgctagccttcacaatatctcatatcttcattggtcgttgacaagacatgatcatgtattcatgtagctgtcaaaacatatagtatttgtttctattctttttttgttaatgaaagcatataaatccgattaacaatattaaatagaaaccactaaattagataccaatttaattacttataatgtatttttgttgtaatttatggggggtttttttcgaaagagaagcaaaatacactgtacatgatgccaataaaaaacaaagagagagaaacaagataccttcaaaaaataatattacaaatagcttttacagtttcaatggggtttaaatggtattttattttataagaaacgttggttttactggttaaatttatatattccaaaatgtatattatatcgaaaattgtttaattttaccgttttgttatatatataaaaatatgcaagcaatacttggcaagatatcaaagagcgaactgtatagaaaacattttcttgttgcatgatttctgatttaattttatacatgaaaggaaatatatgaatgcctacaatagcatcggactttcgggctggtaaatccagagcaataaagtaacatacattgccgtgatagtgaggtccgatccacaaagaaaggataatcatgtgtcgaaggtgaaggtgtttcacacaacaagcattccaaatcactccatcaaccttcttgaaaagaacttctgctcgtgggagtcttgtgcttgagtacattatgttgtttttttctcgctatatttatatgatgtatgaatagtggtcgataaacattttgccgataataagatgttgatatacccaataaaaagggagtcactatacttgagttgaaagatgaaccaagttaatttatgcggttttccaattgccgtaaaccaaccttcgacaaatctttggtgtacttacaacatcaccaagcttctcgagagtggataacaccagcaaaggagctactaataaagaatataatttatgtggtataccacaacaaaatattatcgaaatagagaaaatccataatattaattcaattccattgggaattcatttttgttccgaatgaaagtatataataataaattcatttccacggagaccactagtatatattactgtgtagaaaaaaaatgatagtgcatgatataacgttggtaatttaattgattgattaggttaagtttaaaatacaaagaaaattactggtaaaaaaattaattttggttggttttcaattctaatatggaaaaaatatggcttaaaagttagaatatattataaggcaattgacacaaatagcattaaaaaatattcaaaactagcaccacatataaaaaactacacaaatatcacttttcattttatttaattattaaatgtaaattattaaaagttgtcaccattaatgaacctctgagccacaagagaaggacgagccaaaggaggaggtggaaaaagagaagaaaccaaagtcacagaagaagggtaagaaggaaagtaaaagaaaggaaccagagccaaaacagaaggtggaaaccaagaagaaaccaacgccacaaaagaaagacgagaacaaaaggaaaaatgggcctaaagagaagggtaggaaagaaacacagaaatccgtaagatgggctaaatcagtaggagagctaatcaaaaagaggtgtttacactagaatgttgacagtgcaacccgctagtttgaaagatcagctaggctaagaataatgtatagaccagaatattcgtgttcaaactagaaagaaaaagcaggaagcctaaattcactatggacctccttctgacttttgatttctattgtattttatgtagccctctgtactgaacttacaccccttttttggaagtactagcttttgtgatcccttgaagaactggcaaaggcaaaagcaaacttcttgtaagcagatttgtagtcgaccaacttgtactatgccgacaaactgcttacaaatcggcataatacaagtttgtggactacaaatctctttacaagaactttgcttctgactacaaaatctacacattattcttagcctaactgatctctcaaattggcgggttgcgctgtcaacattctagtgtaaacgcctcttttttattagctctcctactggttcagcccaccttacgaatttatgtgtttccttcctacccttctctttcggcccatttttccttttgttctcgtccttcttttgtggcgttggtttcttcttcgtttccaccttctgttttggttctggttcctttctttactttccttcttgcccttcttttgtggctttggtttcttctcttttcccacctcctcctttggctcgtccttctcttgtggctcaggggttcattatgaacaaatatcactcttcactcttcaccttctcgtcgtctgatatgagtagtggctcgtcattatctccttctttggccaaagttggatgagaaaacgatagcaaaaccatgatcgaagaaaatattatgaacattgttttattctccattttaaaatattttgatcttttattcttagttagttagtttttttttattttaccaatgaggatttctgcatgtatttatagtctaaaatgttcataacattgttatttagtaactttttattagtaaaagtaacatttttctatttatctttgaccaacaataatttattagttatcaacataatttacatttttgacgttttacaacgtttataactattgttcgtttaatgcatttcggtttatgacaatatgaattaagctgaatgaaaatgcatttcagtttatgacaatatgaaaaatcttaagcgtttcatagatagaaaactgggttttgagtcccactatatatgcatttaaagcttcattgtagtaaatttattgttcgtactcgaatgaagtttgcaaaaaaatttaagaaaaaagagtataaaagtaacaaaataagttatttcaaacttgcaccatagtttacaatttgtgaatatgaaaacatatgggcgtattaactatttaatactgactaaaaaaagcggttaatttggccccaaaaaaaacataacaaaaacagctaagatgtaccaatctgatattacactaaaaccgaaccaaggtttacttatagagcaatggtttcatgctttcattaattagaaaatcaaaaatcaaaattgaaccgaactgaaccaattttagtgtatctaaactaaacataatcatattatattttaaaaacttttaatattgtatttacaataaatatattcgtattgtagaaatgtaatataaactgtggaacccccttgatccaaatgttgaccaagggttcattaatgattctaccccaagaggtctggggttcgagtcccagctattgtgatttattagcaaatttgcagattaatggaggcaagtgtacaggagatctacaacgaagtataattatagccgtttgtcaagattttacgcagagaagatattgaagatgtccattaagcgcatggagaaggataagaagattatgtaaaattttttatctatatttataaatttatctagtcatggtaatatgtagtgcaaatataaaaagaaatcacccagcatagaaacatttaaaatttcaacaattctttaaactacatccacaaatccttcaattcttatcttcaaatgatgtgacatatttttaccccactaaaattccactaattcatttacacttgggttagacccttcttacatgttccccaccctagcataaccgaatcgttcacagatagagagaaagagagagattagaagaaacaaatatggtagatcaaaatagagcatttggttgggcggccaacgacgaatcgggcgtcctctctccatttcatttctctagaaggttcctttcgtttacttttgagttttgagagtacacttaattagtctctgattctctttcacaaattttgtatgttttggtgtcatattattgcagagaaaatggtgagaacgatgtaacagtgaagatcttgttctgtggtgtttgtcactctgatcttcataccatcaagaaccattggggattctctcgttaccccattattcccgggtattctcattacttgccatttctcttatcaatgctcccaaatattcttatttcctttgttggagattttattagctttatagaataagaaatgtctaaggtttggattaaaattatattggctaggtgttgaccctctccgtacgattagggcttagcagttttgagcattggacaagttccgctattattaatttattactgattattaacaactatacttttgttaatttgctaggcatgaaatcgttggaatagcaacaaaagttgggaagaatgtgacaaagtttaaagaaggagaccgagtaggagtaggcgtaataatcggttcatgccaatcatgtgaatcatgtaaccaagacttagaaaactattgtcctaaagtcgttttcacatacaactctcgttcctctgacggaaccagaaaccaaggtggttattccgacgtaattgttgtcgatcaccgctttgtcctaagcattcccgacggtttaccaagcgattcaggcgcgccgctgctctgtgctggaatcactgtgtacagtcccatgaagtattatggcatgactaaagaatcagggaaacgtttaggtgtgaatggacttggtggacttggtcatatcgctgttaagattggtaaagcctttggtttaagagttactgtgattagtaggtcatcagagaaagagagagaagcaattgatcgactcggtgctgattcgtttcttgttacaacggattctcaaaagatgaaggaagcagttggaactatggatttcattatcgatacggtatcagcagaacatgctctattacctttgtttagtttgcttaaagtgagtggaaagcttgtggctttaggcttgctggagaagccactcgacctgccaattttccctctagttctcggtaaagaaaacgatgataacccgttgttataagctgtgaatctatgtttgacgtgttgtggaagtaactgttagggttttttgtgttttgttttaggaaggaaaatggtgggaggaagtcagattggagggatgaaggagacacaagagatgcttgagttctgtgccaagcataaaatcgtttcggatattgagctcataaagatgagtgatatcaactctgcgatggaccgtttggttaaatctgatgtcaggtaccggttcgtgatcgatgtggccaactctttactccctgagtcgtcagctgagattttaacggagcatgtcgaccatggagtctcgatcacgtctagattctgagattttcttgagcatggttacaaaatcatgaatccgttttcttgttggacttgttactttgtcttttctttctatatgttttgttccctggttttttctgtttaaaagcattgaaacattgacttttataaggttttgcaaaaacatgaatctactacttgttttacaagttacttgaatagaaactttctctgttcttactatgctctgtttcttgacaacactgtttttgttctttgtccaggtataaattataaatgcggttttagtcacacggaaaaatccaaagggagatgccattatatcatttaaaaaccatatattataacagaatcattattggagtttgcatacatcaaagtttcacagaggaaggcgccggagaagaaccaccggaatttggagattgacagaaaccacgaagaacgttggtttcatcagaggtaaatcctagagacgtgagcatcgcaggccaacaatcggtggtgatgacctcgacggttgtttcaccgttgaggaagaagagaacgatttcgttggtgcatgacttgagctcgtaaagtgcgtttcaacactccattagtcctcctccgttgagtcttgcctacctttaggtttatcttatatacgagtaaaagcccatctaattataagaaatttcataagacagttatacataagccttaccatttttaagatatataatataagacaaattaagagagaaaattttttgatcctgctaaactcaaccacgaattaatgtcgcaaatgcgccaatatataggtgtagatgtcatctagggagacccgtgtcctccatgtctttgcagaaacatttttatactcttaaagacaccacacttagctaataagagcatccacatagcacatcttttaatggatgtctttattttaagagagagaacaagattgacaataaatagagcgactttttaaataaacaaataagaaaaaaatcacttaccaataatatagtgacacataaggtgtctttaggttctattgtgtctctgccgagacacaactctctactgttttctcttttttatttattttttaatgtaaagacccttgcttttatatgcgatgaagatggtctaaatgactaaaaatgaaaataacattaatttttataataaattatagtaaagacatttgtaagagggtcaccaatgtggatgctcttaggtacaatatgcacagaaatctacaccgatcctctaaagctcaacatatacaaagggcgataaaagagactcatgtacaaattagttactttataaaaaatgactatcaaaccttacatacaagtacaactatacaagatgacttccattctacctccaccaattcaatacattacaaaacgaaccccgaacaagatatatgtacgtagttacatgtgagacgtgattacgatggtgaattggtgatatatatatatacatctatatacacaaacttgtaactacgatcgatcaatatggagcagaatgagagaaactatacgtatttgccgtctgaaaggaccaattgttgagagagttaagatcaaagtcgtctgaatcacaataaactacagaagggcttgggtggttatgtctaccttcgtatgttgtcaatatgtaatctggattgttcgtatctctttcgatcttcttcttcacgttgcaatctgggctcgaacacttgtgataatgcctgttccaaataatgatgagcaccaataatttagtaaaactcttaagagattctacaagatttgtaatgtaacagtttgattattatatatagtgtggtccaataattgttaggataacaaaaacaataacgtcgtttatgtatccacttgaaatcaaaggtagcatacatgatacaacaaataactcaattatgatattctcaagtgttattgttataagattatattacaacttgtgggaagtggacaatatacacacacacaaagaaaaactaaaaagttaaataacccttgttgattcttgacaattaattagtttctattcaatagatgtatttggggcacatgttccacatggaaatatacgtaaaactaagtgatagtaaatatatgcatgttggacacaaacatacaaatagaaaattgcatttggacaaaaatctccgaagagggaacattaactagtttatactttatactatataaaaaaaactagtttgtatattcctctgcatttttatagttaatttttcagatttttctatttaattttatttatttctaaacttaaatattatttattagttagctaaacatgatttcactaatgataaaataatttgtagaatagaatttgtaagtgccaatcaaataaattacagtaactaattttgcattaaaatttgaaaacatcatctaatttgtgacaaaataatttccctaaaacattggtgataaaatatggaaggagtattataaactaaatacacatttatagtttgtgactttgtgtgaattaggttttagtatacaaaattatgttcaacttattagtcgaaactcttaaaggaatgctcttcttattaatttagagcataaataataataaaaatctcatttctatgtaatagtattttgtagacagaaattaacaccaaattttaaaagtgaaattattaataactatatatatgatttctgcaatgaataaatgtgaatattatatatcatgtacaagactttggttttatcttacatcgatgtaaggctttgtctgtcttttatttaactaaccgataagcttaatgcaaaaatatcggtagttaacttgtaaaacttgacagcctcgactatatattagttgtatcaagttgtccatttgacatttaactattctacgctttaagagatgcattctttctaaattcatcaagtggaaacattcaatccaatactcaaatcaacacaacctgtagcatatgcaactacaataatccaagctgttgaataaactttaaatccaagtatgataaccgaataaaggtattatacgtcctctacgaagttagaattaatgatttaccttggaaatggactacccgttatcggcttctttccgtatttcctccatttatacccatcatctaaagcaaccttttcatcaattgatgatttcgttttgaagacgtgaataatcggatcttctttgtgtctcttcctctttttgatttcatctttgtcacctctatataaatcattatttttgataaatatcactgttctaatatataattttcatcaacaactaaatttttgctaagatgtatgatataaaagttgacttacatttcaaagctcataggtgaggtagctaggcttgtttgaagcgggcttgtgatttctgcagccactaacttttccgatgaactccaactcaaagtcggtgacgacgagtggtcctcacggccgatttcttccatgatcttctcaaaagtatcgtcaaaatcatcgaacttgaaaaattcagtgaaatctgtggagctagggttagggtttgaaggatagttcatttttagtttctctttttttccaagaaggttgtttagtttttccggcggttgaagctaagaggagggacagatattgttagagtaatactgtttatttatactacaaaatctaagaaaaataatgatagaattaataaaataaaataaaagtctatttgcttttaattaagtaataaaataactttcatggctactttcgtgcgtagattcaacgaagcttctccaatagaatagctatagcgacaagtgatttttctttattaattatcatttatttaagttaaaaataaagtacccataaaagtgggaaattttactttttaacaactttaaggttttataaaaaagttttgaagcgttgtccaatcaaatcctcgagtaaaaaatgcatgtaacatcactggtcccttcatatataatcatattacactaattaatcacttttaatcaaagctagatttcgaaatgatgtagctagcaaacgaaccaacagatgatggtgggtcagaaaacctaggtctcgttaacatgcttctaacttatgtatgaatatattagaaattccatatctaaggtaagaaagaagacacatatgagatatgaaccaatacaagtatttgtaattggttttgggttataagttcatgaaaataaacatggtatagagccgagtttgatctaaatagaatggttcaaggagggatattttattaattgttgatcttagagtgggattttattcgacattagctgataagagcgctatcaacttgggattgtattatgatttcacaaagttaggaaaaatttaaagtaatatttaaggaaaatctagtatttttttattaatttttgagttagaacccgtgaacttcataaatgataataaaactcagtttgttaatccaagtaggatgacctaagttaaatgccggtttaaaattgatcgattataaccatcatcatttctttagtaatagtacgtgttaagatatcacgtcgaaaattaaaaaataatgtttacaacacaaaaaaaagttaaaaagaacctaaagtaatgtataggaaatatatcaagtaccaattcactcataaccaatttgttttgcgttcaaaattattaaagttcatacggtattagagactgactttgatgcaagtaagttaaaaaaatactgtcgattgtagagtgccattcgatttgtaattgacagaagaaccaccatttaaaaagaacatcgaaattgtgatgagacgatattaatacaaacgaattaaggcaccctgaatactcaaggacatgtatcaaactgatcagcaaatgtttttggaatttcgtaggtgacagttttcttagaattatgttttctggacctaaacaagtatggatcaacggacataaaactacgtctaattttaggctgcattgtattagccaaccaaagtcactttggcaccacgtctcatcagtttttctttttaactttggcctaaccaaaaagagacaaaaattatttaaaacaatttaaaagatatctaatagctcagattctatcctttacggatcttaaacttattgtacaagtagttccattgttgtttttaattctaatacaaatagccttatagggcaagttgtcggacattttaaataattatggtcaaacaccaacctctgcatgcgttgccaaaatcaatatataataaataaacacctatcacattttaaagagatattaaataattattcaaattcgggaaacactagacggctttgcggtaaaatgcatttttaaaaggcaactgaactaattttctcaaaagcaattctcagatggcgaaattgttaccatcactaatgattttcttatatttttttgccagtggttaattatatcatcttttaacaaaagaattctggaatatgccgattaaaagccatcattatgattcatgtaaagtgcgactttttctgtaactatgtaggaaaaagcaccttttgttaccagcatagaaaattgataatagaaactttagatttaaaatttgagcaaccaatagcgagacgtaatagttgctacatgaactattaatatcttattgcatgttgtaagtgtatcttattgctagttactgcacaacctcaaggtcgaaggcacatgacgtcagtgaaaatacgccagcatgcttacgtcattttccgtgagccattttgccgtggagatttgattaatttaaagtgttaatacagtttttgtcgttgttaggcgcgtggtgaagcaccggtttggtcgacgaagcttgtggtttccacgtggaaacttggggttttgcgtcttgcacgagaaatttacgacggaaaagatttgtcttttttctttgttgaagacttagaagtactcaaacctctggctaaaaactaattaactcatgatcaaggtactaactatggttctataatattattcgacattctatctttttatagagtttctactactagtttctggtgaaaaagctcagaacgtgaaatatacatgaaaaatctccatttatagaatacgtgaaacttttaaaacaaaattttgttttttagttaattaaaatcattttaatgggtaataggtccaagtccttacaacaatatcacggttacaaaataaaaaggaatgaactgataaaatcgggaacacgagatcatattggaggttgattggaaaacaagaatacacatccattaataccagtgattacaagaagcactactttacagctacgacggtggatccgaactcattgatcaaaataaacggttccagtcgctaaatcgaacccctgaacaaatctgaacctgcaacacttctcccggcatgaaccgattcctaaaaaaatcggaacccaatctctctaatccccgacctagcaaaaaaagagaacctaaaaaatgcccaattaccgtagtttctagctccttttccttatctatttccatttcagacaattcctaatatgtcagaattaacggatataactaaatattgatcatctgtaatggatattccatgatacattgcagaaatttctcaatcgaaatttactgccaagttcggtaacattggtcttgtttgttgcaaaacatttttgaaaactaaagccaattgcatatcaaaagttccattcattcctttttttcctcctgtaatagaggaacaatgtttaaaagttatcggcgcaactcctgctaccacaaaatagaatttttaggataattatgtaacttttgattttttagtttaaaaataagattaactttaataatattatattcaaatattttttttttataataatagttctacaagagtccctaaaattactactttaaaaaaattatggaataatatcttataatattgtcatgtctcactaaattagctctctagattttttatttttttatttttagtgcgatatataacactagaataaatattctacgtatacatattttctttactcttttattattggactaaaggttcttggctgtcagagttcctactatgaactaggcttttggagatggaaccaacatgaaaaaagagatttcaatctttagaatgtttctgatgttcttgcttctgaatcgtagggatggatagacctgtaaaaagtcttctgatttccaatcttggtaaactatattattagagaacaattttcaagtagtgtatataatatacgtacatagcacatttgtatatgatagaaacaataacaaaacaaacaaagcacaagagcaaaatattgtttatatatgtgcttatatataacatgtggttaaaaatcgaaaacaactatttggaaatacatacattttttgattaaataaaactaattcaaggaaaattgtaatcctacacaaaaaaatgtaatgacaggcacttatcataagtttaagcatgcacttatcataatgaaaaggcaaagaccatagtttagagatatggccaatgtttttcatttttgacttagtcatgtagccggtctcccatgtttgacttagtcatgttgactcatttgccaaagaaataactcggttaatatggttgacaagaccaaacccgaaaatttcactttttaagatatattttagactctgtttgatttttttatatcataactggaaaccaatgcaatcaaatttcccaaatatactttattcctaggacaaacaacttggtttgactgaattttggaaaattgtgattggctgattgaatgatgagtgtgcacccttgtattactaataaaaaatttagcaacagttataagctaacgtcatccatgagtcattcattagattcactatttgcgttctcaaaaatcgaattgttaaaatttgagaagctctaatatacgagtcaatgagatgtggcaaaagcatgtccttgaccataaaatttcgaggggtcaactcattagataaggacaagaatcaaccaattgaaggcgtcttctataacaagtttctttattactaatattaaagtccaatggggtgagggggagaagaacttaaataaaaggaaataattggtaagtgaataaaatctaaatacgatactagatgattgatttgtgctagtgcatggtattagatcagatatgtgttactattcgaattcaaattggcatatttcatgttgttgataagaaaattgtagaagtgtaaaagctgagttactatattcaaactagtggtttacataaagtgagacaacaactgtttcacaaaaatgactataaaatagtaagtagtattaggtcaattgattttaaaattttaatcaaattcaaatttgtgatataatcaaatttgtttatagaaaatgttaagaaatcaattttggcagaactaattcagtgagaaacaatcatttacaaaaacaattttaacattatttaacagtaagatttgacatttaacccgttcgtgtgaacccatcatatctaacatggctctacccatgacgcctccatgccatggacaattttgacagatcagaagttctgaacgtggacgaggtaagaacaccatgatgatacgattggagttagttatgtcgccaccgacatcactgccaatctcattaataaaagtggtactaaatctctaatctctattaactataaatataacaaagaaccaaaagaaagtttcttatctctcttatctttcataatttccaagaaacacaaaccttttctactaatggcttacgtaggcttagttgaagtctttattgccttacttgtctttttcttcttccatttcttgatccacaagaaatctcatcaaatcacacctagaaactggccagttcttgggatgcttcctggtgtccttgtcatgcttcacaggatcaatgactatgtcgcggagattcttgaggtctccaacttgacatttgccttcaaaggcccatggttctctggaatgaacatgttgatcactgcagatccttcaaatattcaacacgttttcagctccaacttctccaattacgacaaaggaccggagttcaaagagatgtttgattttctaggaaatgggatcttcactgctgactccaaactatgggaggatatgaggaaatccgcattggttgtgcttagccatcaagggtttcaaagcttctcattgaggaccatcacgtgtaaaatcaagaacgggcttgtccccgttcttgatcattttgcggaggctaatacggttttcgatttacaagacgtgttccagaggttagcattcgatgtaacccttactctggttacgggttgtgactcaagttctctttccattgaaatgccaaagaatgagtatgctaaagctatggatgatgctgaagaagtggttgtgtacagacatgtcaagcctgtggtcttgtggaagctgcaaaactggattggactcggagaagagaagaagatgaaggaagctaatgccgcttttgacagatcttgtgcaaagtatatatctgcaaagagggaggagataataagtcatcattctaatattggaggagaagctcatgcagaggatttattaagcgtctacatgaatctagatatttccaagtatgagcttttgaacccaaacgatgataacttccttaaagacatcatcaagagtttcatgcttgctggaagagacgccattgcaacaactctcacttggttcttctggcttctctccaagaaccctgaagctgtgaccaagatccgccaagagatcaacacaaatctaccaggatccggaatgagtttagatgcagacaagttaaacaagatggtatatttacatggtgcattgtgtgaatcactacgcctctacgcgccaatcccgttcgagagaaagactcccataaagcaagatgtgcttccaagtggacacatggtcgataaaaattggaagattttgttctctgtctatgcattggggaggatgaggtccgtgtggggacaggacgcgtctgaattcaaaccagagagatggatctctgagagaaatggaggcttgaaacatgaaccatctttcaagttcttcgtgtttaattctggtccaagaaactgcttggggaaaaatttatctttcttgcagatgaagacagtagctgttgagatcatacgaaattatgacatcaaggtcgttgaagggcacaagatcgagccagcttcttccataatccttcacatgaaacatggccttaaagtcacagtttctaagagaggcttggtttcataaattcaaaagcacaatattatcaaacttgtaagaaatcaataataattgaaacatcatttgagaactgttagaggcaatataaactaattattatgatcttggtaaaaattgtgaaagttaaatatagatcagaatagtttaacgataatagtttagagaatgaatgctcgaagcgggattgttaaataatataatagaccaatctctcattcaatcttagatcttaacatatatattcaactttttaagaaatatttgcaaatgattacatctaaagatagttgttatgtagatataaaatcggaaacacaattaacgcaacttaaaaataagaaagcggaaggaagttgtaagcgaacttgcacgctccatgacataattagggaattaagttgtattcgaaattgagaataatgaatttgtaattcaagtaatcccaaaatagtttgatatcatcaccttcttggaggtctaatgaatgcttcataatgctccaacccgatgccagaacaaaatcgttggtggtgttcctggactttaggataacagagtatgaatcgttttcaatgatgtctacaacttcgagttcaataccctttcgcaagctctcttttgtaacatttctcatctttttcaagaccgagagcacttggtttttgggtaaaaacagacgtccatggtggtcaacatcagtacgtgatagcgttttcgatatgatcatatcaccatctagttggaaatctttcatcataattaacttaactataaacgttttctgaaaaaattaactataaacgttttctgaatatgacagatttgaaaatgtttgataccatgcaatgcatatgttcaacaatttatatacagttctagttaaatgttacttttcatgcttcctttcttattctttaaatagcctaaagtgatattttaaaattttgtacaaatttacctaaattaataaatactattaattaggtgattttccatgtcatgcacataattaaatgtagctctaaccctaacatttatgtatcttaaaaataaaatctttggcatgagattaaatttattttaaagcttcatcttatacttgggatagagttatgaagttaagaggcacactttaatatcttgttccttaaataattatctaataacaagagatcaacaattgggccttgaagacccattctaggtccgtcaacccaccagaatgatagtaaaggagactttgaagatagacttagctccgcggagatttcggagcggacctgatattaaggaagtagttggcacgtgcgataggtgactctatgacctagatcaaatacatatataaaggaagtagaggacaaattaagggaagattatcgcctcctacctcaagaattcactaatacttaaacactcgtattcaaatattattcattgtactcactcgattaagatcaatataatcattttgtttaatttaatataattttcaaagtttcattgaagatataaacctcttttctcataagtctaaacaaaaatctctattgtagattttatcactcaacaggttcaaaagaaaaatattttttgaaaacaaaaatttaagagaaatatacaaaaagatttccaaattacaaaatatatatatagtctgtgtggtctcgaaaaggccatgagcttgtggtctactaattcttacaaaaacacaagagtctcatactgagtagagaagagataggaaggaacacaaaaacggccatccatgcagtagaacttatgctctaggattccttctatcacgacttttctcacatactatcttttcggattataacggagaacataatatgctggagcaagccaaaaacgcataaactcatccgcatcagtaacgttaacgaaacgatgataactaagcgcacactagagtaaatttgtacatgaattaggcaaaataaaaatcttctttgaccattcatgtttcactgcatcctctagaacccacaaaactataaaattacatttttccgccaaaactataaaatcacaattttagtaaaaaaacagcgaaatagcgttacccaccaaaaccatataatataatttaaatgaaaacatattctttttagtcattttaatataacatgcatttagatgcgaatgtaaattgtaataaattaatcaaacgaacaaagattcatttatatgtaatatgttccatctagatggactaccaaattagtaaacgaataacatcgagatgcatcatctaggtgtatcatctgaatggatcatctagatgcattatccagatgtacaaacgaagagggtcatatactaccattcttgcttcactcttttgtttattttttcttttgcggcacaaaagaaaaccctttaattcaccctttgagaatcccatttgatttgtaaacatgttgccgttttcttacaaataaccgaaaaaagagtgatgggtcttgaggactgaaacggcaaacatttcctcaactaaaaatctaaatgacaaaagactgctcaaagagtgactgatctggggactgagggccataaccacaaaacagagaaatgaaaatcgagttaccaaaatggcaaaattgtataggctaaatcagattcatcaatatccaccatggtcctgtcatacacaagactttgtaaacactatcaatgggatcatagcacaagaagtgtttcatgacaaagctttgggaatccatttcaggcaatgtgatggatcttctagtgctggaactgtataccacaagttgagaagcataagcgttctatagcaaatcaaaccgtgaacaaaggaacaattaattgtgtgaaaaggtaagtagctaaaagaggattcgcctggattttgagtttgaagcgatgagaataagaaacaattatcttcacgattgtgtcagatacgcagaggaacctagctagggtttcggaagcagactccgttcatcttaaaccttctttctccgtctcctaaccctaggtggagacgccggtgttgattccacgattgcgtcgctggttccgactctatcgtcgtagtgaaatgttcttacaatgtcattctcatttgctctctgtgtttttcatgtcggtgagagaaaacaagttaagcgttctcaaacgtttcagaatctctctgttttttagtaaaacatatttcccgttttgtttttttgtttagtgttggcctgttgagtcttgaggattaaaaacggcaatcgtttacacattatatattagaaacaaatatccatcatattactaaataagagaaaaaataatttagttataaagcatcatgtgaaataatttaattgtttgttgatttagcaagactaagcgatgtgttaatatttcttacacaaatctaaaagactggacatgtgaagctttttatttttagtccatagttttttttttaaatgtatcttccaagaatctctccatcaaatggtaaatgtaagatatataaacattcaaacagtaagcaaaatcagagacaaagcggagactattaataaaataaacaaaaactgtcaccaacaaagacaaaagatcatgaaacctcccaactaagtaagtagatgaaatacaagtacaactgaagaacaaattaacatctctgtggaggtgagagtgagcactatttagagaaacatgagattatcaacatggccagagaagatagagattatgacatgataagaatctttatcccaaagtggatccttcatttctttgacgccgtctatgtatactattttcactgtgtttttctttggatgataatagagaaccctaattgtctttgtatgccaccaatggcgtaacaaaataatctcacctgcatgagtagcacaaaagggtcgagaggaaaaaagtcaggcacaacataagctttcttcgaccattcatgtttcgcagcatcctctagaatccacatataaaatgaacaatcaccattaccagtgagcaggattgcaagctttccttcgtagcttgtaaacttttgactcatgaacatgttgtagtctggtaactctggtccttttattagatcaattttttctgatcggacatcaaaactcatgactgcttgagtaatagcgatgtcaataaaagcttcataatacaaaacaccattgatgcatatattaggagacgcaagaaagtctctgattgtttataatgagatttctccgattgtttccatggcggagatatacgaacgtcgcaatacctgtacgaagagatgggttgcgtgttgccttgtttataatgggaaggttttatcataaactaacattatcacattaaaataaaatttgatggatggatgagagtgaagatggcatgcaatatactcggattgtgagaataattctaaccctatcaacgggcagaagagagaaaaatatcttcagttaaatcgccaaaaaacagaatttatttaagtcatattatagaagatatctttgctacaaattcgtaactttgttagctcactccaaatcgagaagttttgctaaatttaattttgagtatcttaaagaatgacgatttactttttagcttttatagatcctttataaattctaaccatgagagcattaagcattacatgtataacattggatattattgaaagctaaccatgagggcattaagcacaacattcaagaaaactagttctatcattttttttgttagatacttagatatataaaaggaagttcaaaacagaaagtctacatattaaatacatgccgagactatgtccataaacaaactgtcaccaaccaaaggacaaaagatagtcaaaaaacctcccaagcaagtacgatgaaacacatctaaagatgaagaacaaacatttcttagagaaacatgagattatcaacctggccagagaagaccgagattatcctatggtatgaagcctcatcccaaagtggaatctttcgatctctgattcctttgatgacgacacttctcatagtatttttctttggatgataataaagaacaacaaatgtttttgtacgcacaaagtcgggtgccaaaacaatctcccctgcatcattagtacaaaagacacaatgatgaaagtaaggattgcgaattagtgaagtagacgaaacatcataagacatcttggaccattcgtgttttgcagcatcctctataacccacaagttaattctataatcagatccaggaaacaggagtgcaggctttccctcgtagcgtgtcagctttggattcaagtccccgtctggtcctcctttaataagatcaaacttttcagatctaacatcaaagctcatgactgcatgattcgaagctgtgtcgagcatagctacataatacaaaacaccattgatacacaaatcaggagtatcttcatgacagagacagtgaggaggaaaatcttcaaccatcctccaagaattcccttttctcaaagtgaaaacctgaagctccttagctaaataccgtctctgataaacatgcatgcctttcatcatacacaacactttgtaatcaccatcaataggatcataacccatatggtggtatatacattcatgattagcatcaatcttgggcaggataatggatcgtctagtgctagggttagatactattagtctagggctagacactattagtgtagaaggaggtccatggcaaatcaaaccgtgaacagaaggagcaaaggttttaagctgtagatgagggcaattcataaggtaagttggtttagaagacgaagttgattcaccttgatcaatcaaggagaagaagcaatggattccgccgcctgcgattgtaaagatgagactttgtgggcgagtcgaagaattaatcaagtacgatttcatgaagtctctgttgcgaatgatggaagtatattcttttgatacggagaggaacctagctagggttttgacaggtaaccttttgagtatctccgggatgagatcaaacggaatctgaaccgagtttccactgcatgtaattagatcatcggatatcttcgtcttcttcgatctctgtttctccatggcggtgataagaacgaaaggcatcgatttgacttcacagtgagaaaaacttaaggaataagagaagaaatatgaaaggacggtgaaaaaacgtggtgccgttttaaacgggttggaatatgactaaacgtcgtgccgtcttattaataaggaagaaacttttgacgcatgtcacggatttaaacactacacgtttccactaatgaccattattaatccattatacacactaaattcggaatttagatgggccttgtaaaattgtttcgtaaccgaaataaatggaagattttaaatatgaccaaatgtaaggagactgtattgaaagacaaaatattaaaagttatttgagttttaataagttttggtatgattctggtcaacttggttgaattaggaaatttgttattcaaattttttcaaaattcagctaaaattatgagatttgaatttgtttttaacctaaaatttttcttgaattgtcatataaaattatttaaatcacttcaaatccactacttcatttttttacgatttgattgtatattttctaattactaatccaataatatatttagcaaaacttcttaattttgaataaactaaccaaatttggatatgtagcaaagtttgataatatcttctaaattctgttttttgacgattagattataaaagtttttggcaattttagtttttttcaagcaccaatgaggggaagttgttaggaatttgaaaatttcatattcataacatatatttcttttggttcttattaattgattttttagaaaaaaaattgttttaaaaaaattgatttttaggaaatgtaaatcataaaaactaatatatttataattagttttaatatattattttaatctatatgttttttctaaaaaatcaattaaaaaatcagagaaagtagttttttgccaaaaaaattctgatgccgaatttgagctttgtatcctcagttttcttaggtgttagtaagatattttgcttttaataaagaagataattttgtgaagaaaaaaaaagttttgaggagaaaaatagaggataattaagaaatgtttataaaatggtcaaaacaactaatgacatatttaaagggggaaaaatgtcatttaatccctcaactttcaaaaaatgatcattttatataccattttatatatgcgactgtttaatatatgaactaaacgttgactaatttttaaaacattaaattaatcaacgtttagtttatgtattaaacggccgcatatcaaattaatgtataaaatgacaattgaaagttgagagattaaacgacatttttccccgcatcactgtttcagcttcaccaaccccattattctctctattaattatcaaatgaattagttattagtcccttaattattcaaaaaaaaaaaaaaaaaaagtcgactcatcctccggcgggagtagaaaattcttcttggttctgcaggtggtaatcttgttttccttaatgaagtttcttagcgctaattttttatatgttttctcgtttaaaaagtgtcaatttttaaaaatcctttcccttttacggttcaatttgatttggataataattctctttttctctggaaagttcgaatttttttttgtttggaagcttggagaaaatattatactcttctcattgaatgatcaatttacaaatcctcatttgatcgatcttgtcaatttttgaaaaaaaaaatctgaactttgagaaaagttattgagtttcgatatctgtcggtcatggtttgattgtggctgttgggtaagacaacaaattaggtagggttttgtgatattgatgtccgtagtccttaattatggccaaattgttgtcttttaggttttgacagtagcaaagaaaagctgaatctagttagaaattgcttttgcagggtttttgaatagtttgtgtattgaagattgtctgaaatggaagcagctattactcagaggattcagtacccatcatgggttgattgtagaaaagttgagtgtaagccgcagcgtggttcattgcggtattctcagcaggttaaggtagatagaaggtttagaggtctttctttggctcgcttgcaacctgaaagaagaaatgatcaacgaagagcagtttctccagcggtttcctgttctgataacaattcctcaggtggttgtgaaatcatatggatgcttacgacataactcaatttgagtgccatatcttcgagtgtctcattcgatctttgatttttgcagcgttgttggagactggaagtgtttatccatttgatgaagatattctcaaggcaagtaatatacccttttatagcatctagtgaaatgtttttcttcaataacaatcttactgagcaatggatacatgaactttgcagagaaaagcagaagaggttaaaccgtatttgaatggacgatctatgtaccttgtcggtcagtttctttgtctgctctatgtttgcatatggtctacttcttgatacttatatgtaatctgatgattccgtggtgaacacaggaatgatgggttctgggaaaacaactgtgggaaagttaatgtccaaagtgctcggttatacgttctttgactggtatgtatatgctactgaagcaaagcctttatatgttttatatgcttcaatagaagtctcctggaaaacattttatatgatttggtgttagttatgaatgtgttttgtaaccttctataagttttgtggttgtgtcagcgacactttgattgaacaggcgatgaatggaacttctgttgcagagatatttgttcatcacggagagaatttttttagaggaaaggaggttatttttatgatccttcattcaagctcttcttctttgtctactctttgtttagtgtgatccattgttcatatttcaagctaggttcttttttctgtctagaccgatgcgcttaagaagctctcttcgaggtatcaagttgttgtttccacaggtggaggtgcagttataagacccattaactggtgtgttcccttcatcctgttcaaagtataatgatacaaaactcggttccttgtttaacttgtttggtaatctgatgatattatcaggaagtatatgcataaaggaatcagcatttggctagatgtgcctctagaagcattagcccatagaatcgctgctgttggaactgattcacgaccactgctacacgatgaatcaggagatgcatactcagtggtactgattctgactgttgtacaatcataagccttggatacttcaaacaaaacattcatctttttttctgtttgtgcttgtgaatgaattactcgtaggctttcaaacgtctctcggctatttgggacgagcgcggtgaagcatacacaaacgcaaatgccagagtctccttagaaagtatgtcttcttcatccatcttatctgccatagcctttgttcaatctgtgtaacttcttctggaaattttgctctccttccttgtacgcgaatcatcagatattgcagcaaagcgtggctataaaaatgtctcagatctcacaccaactgaaattgctatcgaggtaagccaggtcctttctcagttacttcatcattaatcatttcaaatcaaactcaacaaagcaaatcactcatcaccaggccttcgagcaagttctgagctttctagagaaagaagaaactatggagatcccagacggcgacctctaatttcccagccttcttttctccgtctcttcatttatctgtttaatcaactaaacgaagcaatcactcatcaccaggccattgagcaagttcagagacaaagaagacctctagttactggttccgggtcattggagcttacacgagcctaattttgactggaactatggtttattgaaagaagattcaatacatgtatatataaaatatatacttttttttttgtttcagtatcatccttcttctcttttccttacaataagaattaagaaaaagtagccgtgtttgttaacatgggccaagaacaagcaaagtgatcattcaaatataaaagtagctttctcatggaatacaacaaagaaatgcacatgcagaagaaagtagatttaactctaaaagtacagaagcaaatctatgaattttactacaccggcaagtgtttcatcttggctcagggcattaagccaagctatactctttgtcgattcactagttccggcaaagtagtctaaaccactatgctcataacaatgattgttgctcacggacatacataacacaaccaataacgatgaatcagaagcagacctgtgtggtatatcatggatgatgaagatatgatgacagtatacatgtatgcatcatcatcaaactgtagctgccaagcaattcacaatggcagattcattaggaaccgtaagcacggtaccagaccattcaatttttccccaaatctccctttctccacgccttccaacatcaatctccgcacaccaaatctccattctcctagaaccaccactaccagctttaccttcccacaaaaccgtaagctttccaccacgattagccattgtagccccacaaagaaactttggaagtgactccacacctttcagctctctccaaatcctctcttttggatcataccctctaatcttccccaagtaatcataacaatacaatatgttctcaatcacacaagctcttcctctccatcccaaatcaagcctcttctcaggcatctcccatttcttttccttgggttcgtaaacaacaccgtttcgatcagccattgcgtaaaccttcccttccataaccgcacttgcgtgcatccatttctcacgaacctccatacctggactagccactggctcccaagtttgagtctttatatcaaacatctctgcccagttaatcgatcgagcccaattatcaactacacatcctccaatcacataaatcttcccatcaattacaccagctgctgcaaattcacgacctactctcatattagagactcgtcgccaagtatgaaatctgcaatcgagaacccacacgctcgaagaaggcacgtctctaatagatccaccgatcacgtaaatctctgaatctaccacaacgtaagcggatccgactagagacggtgaaggacaagatgggattggaacaagcattttcgaattcgttgagttcgataaggttcgatggaggagagtgaaccaacacgcaccagattcaggaggtatacggattgctacgtagaggatgttttcagtggctccgacgagagctctcgtggcgtagagaagaggtgatgttgggagagatcggaaagtcttggagacgagtgagaggattggatagtgacatctagggacgcgagcaaggcaactgagagcaacgtcttctgataacaacggaatcaattgcgccggtgattttgtttccggtggttcgtcgccggagctcgttgtagccgccattgatccgttttgatcagtctttatttccttctcaatttaaaagagaaaattaattttgcaattattcggttcggttcgattcgattaagtcagacaaatccgagaagagaaagttattttagaaactaaaccgtatttaaaccgatatgattgtgccgttatctacaagtgctgacgtggcgggaagcatgatctcgtggtttgaaagaagccacgcgcttcctcgtcttcccttcgtcctccgacgtttccaattgggagaagaagaagacgacgatgaagcatttatctgattctgggtctgttgaaaatcaaaattttcttgagaactttttttgaagagttatgattgcattagctgcttcttcgttggggaatacaccgattgcttcgtttaaccgtcattttagattccggttacatccacgaaaccctctgatacaagcagcggtttcaccttcgtcttcttcttcttctcctactgcttcatctggctttgatttgagttctctcgaatccgccattaacaaggtcaattcagttcacaacctttacatgctttacttcttgattcgatgaactctgcagttaaaacataattctgaaagtgggatcatttgttgatgcagaaagatagtaatggtgttaaggaagctctcgataaattgagtgaagaaggttgggctaagaaatggagctcccagccgtatctttcgcgccgtacggtgtatatcgatctctctatctaagcttatccttacgatttgttaaaaccatcgattagtcgattagtcagtaagagtgaagaagtgatgtgtcttttttttcttgtatcagacatcactgcgggagctgacaactctcggtatcaagaatgcagagactctggccatccctagtgtcaggaacgatgtaaggttctgtcttgttaagcctatctttggcaagaattgatttattgaggtttgtagtgtatgttaattaaggttctctgaattctgattttaagtttgagtaatgcaggcggcttttcttttcacagtagtcggatcaactgggttcatagctgtacttgccggccaacttcccggggtaaactttcaaatacgctattttctgtggtgtttaaggccatgaaaagtctttggtcttgtctcattgatgttcagtagtctgttctttcttctagagaatagtttaggctatactataccaagaactacatcctacactatagaccgtgtataccatgtcgaaatcaatgacaatatctcggtttctgtcaagagtgttaggttctatatgacatatgaataactgttgaatctggacaggactggggattctttgtgccttacttagttgggagcatttcgttggtagttttagccgtgggaagcgtttcaccagggtaagaaaataactgaaacactgcatatttggttagcgtaatgtactctgggatacagatttatcttctgctgttttgttcttgtaggcttcttcaagctgcgatttccgggttttcgacgttcttccctgattatcaagaacgaattgctgcacatgaagcagcccacttcttaggtacccttgaaaagtttaaatctttcgattccaaaggtgcaatgtcttgattgtgtttaaaacctgcaactttccagtggcttacttaatcgggcttccaatcctcgggtactcgttagacatcggtaaagaacatgtcaatctcattgacgagagactagctaaactaatatacagcggcaagcttgactcaaaggagctcgataggtagagtttagttaaagagaaagaagaatcagagatctcaagattctcaacccattgaatcttctttggtttttcaggttggctgctgttgcaatggctggacttgccgccgagggtctgaagtatgacaaagtaattggccaatctgcagatctcttctctcttcaggtcctctagttcattttatctcatcactcacatgttcacttggtagctcaggttttagttattacagcttcttctttttttgtctcctgcagagattcataaacagaagccaacccaaaatcagcaacgagcagcagcaaaatctaacaagatgggctgtaagtttctcttgtcatctctcatacatgtttttttctaaagtattcatgaacctacatgttatgttatgcaggttctttactctgcttctcttctcaaaaacaacaagaccatccatgaagctctaatggctgcaatgtccaaaaatgcatctgttcttgaatgcattcaaaccattgagacagcttcctagatgaacaatctctgttatctctttaatcgatacaactacgtcccataacaacactcaattgtttcacatgaacttccatatcttttatatatatatataaagacacaaaagttacagactttcattatcatcttcaagcaccatgaagaagagcaaactatactatactattatagatgaaagtgtacaatagtaatacatttgagagtggtatttatcatttatgaacttaaagatcatcagaccaatcactaggcttggtatcgtagaacagtccatcaacgatctgatcaaccaacgagtcaatgaacgagttgcaactcactgtaaagatccgtccgactctgttccgagaaatcgttaaccaagcaaacatcgccgcgcatcccatcgcggcgagaccagctccaatagcttcactcaatccttccacatctagtttcttaaacaacgagttccccgtaacaatctcctccgtcaccgtcaccgcaaatacaatctgaaaacagtaaatttacgaattaaaccgactaaaaccgagatcgagtttctaatttaaggtttagtgtctaattaccatggcgagtctaccggagatggtttcgaaatcctgactcttcttcgaactctctatgtaatccgtaagcgtctcaaaaaacggagacgctaactcaacatcagatcctcctcctccaccatctccgccgtcctttttagcgatgaccatatcagatccataagatctcagcgtgcaaagccttggttggagcacgatcttcccgttctcggctaaatcgccacctcttggtcgttgctggatctgaatctgcttaatcggttccgatgattcgcatctaggagctctaaatctcggtgacggtaactggtatcgaatcgctcgcgtagccatagccattttctgatgatccgaggaatcttttgagtaaagtgagaatttgagggggaaaacaaaaagagaaatctacatggtgacgaaagtgtacacgtcgtgtcgtttattgtgaggtgtcaagatattgttcgacgtggctccgttttccctcagtaacttgcttttcaaacaaaaaatgaaatttagaaaaatacgtttgaactacgtgtcgttttgcttttatccattcgaaagctgaatgaaccagattcatttcgaccaaacaatttgactcttctttttatcgatgtttaggtttaggtcggtccatttcggataaaagggacaaacaagaataatggatatggatatgaatatttgggatacactaaaaattacctactaaattagagaaaaaataactgaacaattgttgttgttgcaatgggaccatctgttgctgctgtgattgttattatgtactctgttgcaacaatggtgaagcttcctgtaaatcagcaacaactaacatggtacagatgagataattctagtaaatccatagcaacattctggactcccattagaccattcttagccagattttgagaaaaattaagtaagctgtattttgcaactgtagtcattacgttaatagtactttttaccttgggaccaactgagatgacgatgaggacgtatttagaacagtatttagaacggagatctcttgtttggtaaccaccgtcagctcttgtatctcctggttgggtgggatcatctttgtggatggattctcattctactaaactgtaaatccatctttgtggatgcttctttcgtgttgaatgaaaaaaaactcctaagccgaaaaattagttgaatttggaaaagagatcatgcgatttcatagaaagaaagaaaaaaattggatttcttatgtgtgattttggtagcaaaaccacaatacacagaataatgcatttgctcatagtatactcaaaacataatatttttaggttttataacaatcactcaagagctgattgtaatacttcttctagacgcttctccgctgcttcgtattgccttttcttgtcttcgaattctagtgtagccaaagctttatccggaggcaaatcctggtagcttctcagagcatcaagaacgggtttagtcatcttctccaattccgttaggtgctctgccatttctactaacacttttgtggctgatctcagagattttgattgacatattggatgcataatcctgacgttccaaccattcaatgtcagagtccttgtacatctttatgtactcttcctccttgattgccgttacttccatatttgttttccaattttccatgcgtgattcacaaggaactactacatcatcttctagttgcgcaaggattttctttaaatacgttagctttttgtatcgctctaaatacctaaatctaaaaatccggccgatatatgaaaaaaggaaaaaaaaaaaaatcaaacgtgaattaatttgtatgtattaacctgaaacactttttttataaatcatcctaaagaacaatattacctccaaatccatcctcatatacctcaccaccaaaaggacccacgcatatacacacatatcaatatgatcatataatcacatatcaatccacaaactgagatcgatcaagaacgcatttctccgaccatatattacatcaaatcatactcttacgaagaagatactaagttctggtccattatttccttcgggactcaacatataaaatgtctctgaatctttagacccaacgactcgttcgaagtaagccctcatgtaagccatctccgagtctggtccttcaaactccgtgttccctggcaaaactccggcacccatcgaaaccggtcttaatagctccataacgttgaggtcttcctccgtcgcgtcacgtttcacaccgtaccccgttttcttaccgttactaaacattgtccataatggctcgtccatgatcttgatcttctctttatcacctcgtttctctgtctctaacgcgatcctaaccatccctccgctaagctctttttgtagcaccattgtttgcattgcgagctcgacgacgagagatggtaaacatctagggctttcttgaatcgagaggcttacacggcctttacggtatccgaataaggttccggtaactcttgatccgcttgacccgcttcggtgctggtcaggtaagctaccgccggggaggaccgggattttgcaagctgccggtgtgatgatcgggaaagatcggaaaaccgaacgaaaaactcggaagacttttttgcttttcttcttgtgttgatgagatggttcgagtaacgtgacatgttgacgtggagccggagatggagacggtgacgcagacggcgaaggagttgaatatgagtcggtggaggaggaagcaccgcttgccctttgctcccccattaaagacggagacgtcgacgaagatacgacgacgtttttatcgaaaatcttctttctattttaaagagaataactaatgtaaactgtttttaatcctgttagccttttttgccttccatacaccttgcagattttaggatttctaattttgtttttgttagaaattggaatggttttgaaaaaaggtctaaatttttgtgttcacatgggttatagtttatatacgttgttggttttaatttgaagtgtgatcagccagctctatgctctatttttgagagtaggaaacaaagctgtaaatttcacgacatgtgaaaacaaatcaaacgagtttccaaaaatagagaaatatatatacataaagttgtagtcgtttgtataggtcaggtcaatgtacaagtgtaatcggctgttaatctcatatatgatatctaagtccaacttggtgtatagtggattttgtaagcttgtaacaataatttaaccaaaagacggttaattcaattaagatatatatcaaaatttgaatttatctgcactgaactataaacttctaggctgatttaatcaaataaatttatatatagatacggttttaaatattgttgggaggtttatatgataaaaatcaaactgaatgtaattgtgtcaaacttactatactattgatacatagtacgatgaagtactatggatattcaagtttagcttatcaatggtttacccaaaaaaatatggttacttcagtcttgcattgcatgcatagtattttgtcataggtatgtatattaatagtctggacataaatagatatgatattcccatgagttcgttgctcaatctggtttccggctcgatttgagtctttctattattgttttggtgagttcattttcaggttaatatctgctttgagttggttcggttatgtttttattcattaataaaaattagtaccgaatcacctgattaaaattgtggtttggtattttcaattctgtgtgatactcctaactaaccgtaactacctaagcattcatattgtgactattccaagtctaaagaaattaaatatggtagagttgcttcattttagaatgtggtagagtttcaattttcttaacattgcatcatcctttgcatcaaactaattaattagtgaatatgaattgtatttggtagtttggtactggggacaataaaagacaagtgaatggagacaagagcgatacttattataaaaccaattaacaataatttaatagttgtaagttgtaacgttaattttctaacttcaaattaaataagaatataagaagaagacgtcatgaatataagtaaatatctaaatcaatagtatataattagcaaaaagaagacaaaatataaggccgagagggaataattgatacacacacattatttgtttttttcacgagtgactctctattgcaaatggaacactggtccaaagaggtatagagaaagacataaataaaattccataagcaaagttatgaacagcaagaaacaaaaactatatgcgttcgccaacacatctcattcagatcaacccaactatgaatttaatctagttaaatatattcagcaatatctttagactgcaccgcctatataccgcagtttcatttatgaattaaaataggaaacaaaatttcgtttgatctttaaattttttcacccaaatatataattaaattaactgtttataaaagaagttattttgttatagttttttttttcttttctttttgtttcatctgcaaatggttcagattacaatgaacggcatcaatatttttatctacctattttgattgttcacgagatttaattaattaattgatttggcaccctagttgttttagtcttagttaaaaaaatttgaatacattttgttttttaattttctttataaaagggtatttaatgcaaggtagggtgtgtgtgtaagaacgcagagaagcaggtgaggtcaaactagacacaacacttaatgcattgagcagaagaagaagaagaagaagaattaagaagagaaagaaaacaaaaaacatggaagttaatggagaagaagagagaagaagtagaagagaagatgaagaaaaagaagattactactactctcttctcaactctccatgttctgtttgtaacaaatttgttcaagccatattgaagtgtcttggtcttgagtcatcatcaataccaccatcttcatcatcatcatcaccatccttagtagaagaagaagattcaggaactgaaactgtaagctctctaatctctatgtactacaatctgttcttataataattatataatcaaagatgcatcagaagtacatagtttaggaattaaacgtggagaaaaaagaagttaatttaggaagctaggaattagttaaaccctaattgaaaatttgatctttcttcttttgttggtcaaacacacttaaactaaaaaggttatactacttatattggacttaatgttagaagtcatgaaatttgcaataaattaaacatcgtatttatgtttcattatataggttgaagaaacaggatttatggcgaggataacagcagtgttaagaaggagaccaagaccaccaccttatagctcaggacgacctggtcaaaacaattgattctgattaacactcctgaagacaagcttgtgtctctccgtgtggatcttcttgttgtttaaaattcacttatgatctttatttttttttaccatttttttggttatgtgagcggtttgctttttttttcttcttaatttatctgaaataagacaaaattggtaagactcttttgtaaaatagttttcatgtttaccttcttaaaatacgtgagacttttttttttttttggtatttttacgtgagaaaattatattcatcgtttatatcgatattcttctgttgctcttatctaacttgagtgtaagattttttagtttaacactgggaaattaaaaaaaaaatgataaatgttttgttatatctatataggaaaacattagtatgtaatataaagttaaaagagttgaaccaatagaaaaaatattgcagaatacaatcaatcaaaataaactacataaacatacattatgcaaagaaatttgagaaaattaaataaaatacaacaaataaaacttattgaaccaaaattttatcagatttttttagtttaatgagatcctataaatttggattttgagagtattaagtgaacaaaaaaacaagtgtaagtgaacctaattacgaaccgggtaaccgatttactggtttaacccaccaaatccgctgtaattccaaaacacactgttgagaaaagtaagaacccaagcgaaacagagagcctttaaataatttccatttcattctcatatatacaagaaaaaagagaggcctagagatcacaagaccaggtctacaaaattatcacagacctttgtttgtttgtgttttttcttatttatcctataaatctatataatccttcttcctttgctcccatcctaaagatctttccttctgtgtctactacatcaacaacctgtaaccgcaactaacccgagcttcatgtgcttcttttgtgaccatcatcgtcttcttcttcttcttcttctttatctcttataacatctatcaccgtagcattgcagaaaaaacatctctgacagttgagaagatgtctagttatgcagccataacatgatcgatgtgaacacggagcaatcattgcattagcctcccccgcgtagcagatacagcaagtgttgtcttctatatctgtcgtgtctttgttgaatgactcttcttttctttcgggttcttgcgatgaagcccggtttatgagatggctcaagaagttctcaagctgtccaagtttctttacataggcatcatccccgcttacacaaccgtcctgaaaatgtttttgaaaagctgtgtcagtaggagaagcaaacgagcagaaactagatttaagagcttacgtacccaattatattccaagagatactgaaacccgtaatagactgtatcgggacagtccatgcttgcgaaaagaccaattacatcatgttgttgctttggttttgagtcttcactagcctccaagagattcaagattataccaaccaaaggagctaataagatccctcggctaactttctctgaaggttgtccctgccgtctaagtgacctgacagatctcaaaacaagaagaaaacaatatcaattaaaaattagcgatttccaacaaagttagagctatttgggatatttttgaacttacagatcaaagaactcgtcatctactgctgaggtcatgtgattcaagatgaaaagaatcaactcagtgagcctacgaagattcgtgtcagtcccagcaagaaatgcttgtggcattgcgtaagtgcagaattctaagacccttgcgagattgcttgaaagctcaaatatcacacaacatttcctttgctgaaactccattacctgcataaagacaagacgaatcaaaaaccggacaaagaagcaaatagagtactacaaaaacttgtaagggaaatgcagaataagaaccacaatcattcagggaaaactattcaattactacgaaaacttaatcgatgaaaatgatccaagcttataatctgacctgatacttttcttgcatttctcgcaccgagacagaaaattcagtgatggtccagctcagtgtgttgaatagacggttaagaaaagtagaaagtaattcaccatcattgatacaagcatctcgtagaagcgcctagacgaaaaagaaaatcaaaatccaatatgtagactgaggatcagataggaacaaagtcaaatcaatctaaccaacctggaaaacagtagacgaaaacgaagactctccgttctttaaagaactaaacccagaacctttgcaaagacgaagaaatatatttgtgacagggatccaagatctgttgtcaaacgctgccagtagtgctgcaggcatgtgtcgagtagctgcctcattgttctcgaaagcttccaagtactctttgtactgtaccaggacggatattgactggagaagtagatctttaagatctgtattcgatatccttgaatcgttgaagtgtgtaactacgaaagtgatctggaaacccaagaatttgcaatgaccatgttagagctaatcaactaacagtcagccatgaggaaaaataacagacaaaaaagattgtgtgataagagtttaggcatacaaatgatgaaagtccttgtttgatgaatgttgttgatgggacaaacggaggatcgctcttgcgaagcacatggaaacagtctacctgaggaaataatcaaagagattgtaaacttagggatttcattgagaaacagagaaaacgcaacagaataagttgttggaagatctactaactttgatcaaagagaaactgaaacatgttcatttgacatttatatcaagaagtaccagaaatgtgcaaaagctgtttaccaaagattcaaggtagaactctggaatataaacaaacacagaatccattttgctgagaaccagaagtagctgtacaacccacatgcacaatgcatacattcccctttgcttccatcgagagaacaatgagatgcggaacctgacaaaatgattcagaatgagggcaaaaatatagattgtaatgttgcctcacatgaatcataactgaaacctcttcactacaccctccttctggagttaacgcaatccatgagttaagtgaaacttaccatgcggaatgtctaacacagtccatcacgtcttctttgtagttgttgcgagcttccttcaagcgctttatttggtcacaagaagcccgttctcttatctgtttatcagtttcttcaagaagtgatattgattgcgattggtgagacatgtaatatgatgcctaagaaaagcagaaagagaacctatcagcctctcaagcttattcaggttgtggtatgtatcgtacaaaaaatacaacaaaatctaattaagacgggaataattaaaattacctgcttaaaatttggagcaacagcaatatggtataatagcaatagagcatccaatagttcttcttcgcttagtatagcagatgagattctactctcttgaagtgcagtccgcataaatcttactggacgataaccaaagtcagggtcagactgattacttgtgctaggtttgtcgtctatttcttcactgaaacttccagcactacattctgcagcaacatgagaggatctctcaggaatggaactgcatcgaccacgagaactttgagcagtattttttcctcgatccttcaaggatttagtaagatcggtatcataagctaagcaacagcatggcttttgctcagtcgcgtgagttactctattctgttcatcatccatacaaccttcttcccaccgcattatttcttcttcttgatcatctgtggggtaggacttcgatatatgactaaatagcccgccaagcctagtaatatcagcgcgatgtggatcatttttaagaaacaaactcaatggaaacttctgctgaccacctctgtgaagaaaaccaacattgtgatggacggcttcactactcttcagcattgcaaaaccttctgacaagaagtggagtataactgagaacaaagagacaagaaccgaattgcgtgtaactccagaaggggccagagtcctatctgcgcctctgttcttcaataaaaggttctgtaggaatcccctgaaagctgaaccaggaagctggggaggtgatacaggtggtatgaattgtatgaccaagagacagaggttcctctgcttctcctcaatctgaattccaagagaaagaattacttaattatgttcctcagattccagaggagacttatgccagcggttatttatagaaaaataaaataagtcagaaataacctatcataccttgttaatggcttcagagagagcggagatcgtaaatcccatgctactctcgtaggatatatcttcagaggatccaggccaccaaacaacaggcattaagtgctgtaagtcatgcttgttggaactcctgcatgacaagaaaccttcaaacaaaaactcgaaatgcaaagatctccaccattgtaccatcaattcttcccgtttaaacaaatgacaagccagcgccagatagggataaggtccggagtatggacactcggttaaaatcagtgtcgctgttttgcagccacaagccagagcgtttactacatgctcaaagatcaaatgagattgtgggaactcaagaaacacatcaagaactttgtctaaacttgacgaatcatgcggtgcttgagttctgaaagtctccaagaggaatgacagaaatgcaccccgtcctaagtactccgccaacaaagggtcttgctcaagtatataaaagaactcatcacatatggcagacgaaacagggcaaaagagttcttcgactgaggcaaatctcctcagtcgacttaatgtatcagccaatgagcggtctggcctatccagcagtcttgagaagcatcgtagtagctctgttgcaaatgaaaatcgagttggagcttcttgaagaggttggaaaccgtcaacagggtacttaaacgggtaagcgccgaaatttaactcgcatctctcaccttgggagagagatatagcagggtaatacccaaatccaggtccaagttttctaataccagtaaatgcagccccgagggagacaccattcctgtagaagtaaatctcatcacagttcaaatctatgcagcaaccgatgacatccccagcaacccatgattgaccataaggttcagcttccttgttccatttgcttacccttcgaccatcaaaagcatatgaatcatcagcatcacccacacctttctggtcagtgaaagggcaagcaagtgttgcccatccaagttgttgaattcccgaggtctctaaagcgacttcatacatccattttcctttccaaatacaagcattagccctggcgctactgaaaagtgctaagctctccaatacaagaggtggcttcacaatcctgatatcaccacatatgctaaactcttcaaggccaacaataggaggtccaacaccatgatgaactacactgattccttctctctgactaactgaaacatccaaatcaccatgaagcttcgagaactgattcttaatcacagctctaatcaagctactgtctacttgaccatccaatggaccaaccgacttttctgctaaaccaaatatgaattcgatagtccgttctaaaggccggtgaccagaataatcaaaatgtggaacaatacgagctttcgaggaattttctttagcatcttcaccattcagtaaaacagccaaaccagatgaaatcataccaacccgtaggctgtcttcagccatatggcattgattgtgaaccaaacgcgctttcaacacaaccaattacaagagaaccaaagtctgtatctattcaacgagacctcatcagagacaattcgaaaatgattcagaaaagctgtgaagagaagaagaacaaaaaaaaaagtagcataagtttccaaaaatcaatacttgaatcaaaaagctttcaaatttatgtgatgaacagggattaacaaaaagagaaagctattcaatttcaatcaattagaaagaaaaaaacaccaaaatcagaacggaaaattcgaaactcaccggagaaattgacatgaaaagcgattaacccagaagccaaaatcaatcaatacccagattcttcaaaccaaagacggcggacttgtgctagggtttttcaaataaattaaacaggagaagacttttcgcttctttttttttcttcttcttcctcgaagagagagagagagagagattttgcgcccaatatttttgggggaacagagaagaagaattgaagaaagagagagagaggaatcagaagaccggtggctaacaccgaacgagccaatggatcatgtggcgtgtgggttttttaccgacacgtgtcggtgtcgatgacgtggctgatgacgtattatatcgacggtctggtctggtaacttttatagaaggagaaggaggaaagtttacgatgcggacggtcttacgtttattttgacacgtggcgtagtagatgttaacgtgttcttaaatcaaattacaaaattacaaaaagtaaacaacgctttttaatttttctccttctgttttcttttttagtgttaacattatgagatttgttttactgaagatatttcctgttatttggattaatcaaaaataacaaaaaaaaaggtgctgtaaaacttagcaatttaaaggtaaagttaaaagaatgttagtatcaccactaactaaagaaaaaatcacaaaaataatatggtattgtttgaatattcttttttttttcattttagtgttagtattatgagattttcgtgtaaaatttttgctaaaaacattgttaaaaaaaattagttttgtttatcgcttttaaatagttattatttttagtttaaaaaaaaaaaatattattgtttattatcaaagatgatttggtttcgactacccgtgaaattttcgaatgtgattacagttgtcgaatagcgtatttactgtattttatttaagtggatctaaaatatgatataattatgattaatctaaaaagaaatgtaaatttaagttatatatcacttttgtaaataatttctctcggaattattttttttaagtccttaataatatcttatgacaaaaaaaaaaatatgaatctagttatcaggtttccttggtaaagaaaaatttagatgtaagtttcctatttgtagattctataatcataacgggtttcacaaacaattataatactggtatcattcgttgacaagaactaataataatctggagttgacttaattagaaaactttatttgtaaatcaattgtcaaaagccattcgtatattcttaatacattatgcaaattaaagaagagtgttactataatgtatgcacgaaaactattcaagtggatgtaaagacgattgaaatcgacggaacgtgacggagcagttgttgacaagtcaccggagcttttgcaaacttccgatagacacacgaccttgtcaacgacctgagagtataaataattgaaaatatcaactcgatctctaaacacaccacgtggaaagctatgagaccactgtcggctaatgactaataaaagaagtatcgtgcacgtgttccacgttgatcaacagccacttcactggctgatgtctctgttattcagatagtgacttaagacggcattatattgtcttcaagggaaatattaaaacgctgcgtttccgtgtgatggaataattttgcaaccgttgccacttttacttttgggaatttggttgaacagcaacttgtttttttttttttggtaaatatttttggttgaacttgtcattcaatgtagcaaaacttagtaaaaatgctacaaaacataaagattttcaaatgtgccaaacctcagctctatggacgatttccctgttctaactatactaaaatgcatagttttggtgtagtgattaacaaaaatatgtatggaatataatcatgatgataatgataatggtaagattatgcttttacttttgattaaaagctagtgatatgatttgcctcttaatttgagtagatgattttcaatgtttggtactattttcattgttttagtgggaagaaaacaaagagatttggtgttcaatgtagcgttagttaagtagatgaaaagagatacgttgatgctaatgatgatgttatgatgtttgatactttatatgtttaatcatcatattatcattaatatgctttgtttaaatggtgatctttatgctctgttttggcttctactatatatatatgctgtatttttctatgggaaagcaaagcataagtaacgacagttgaagtccaagtaaagtactagattgtttcatgcccattgtgcaagagccatattttatttattaacaaaacatccaactgagactggagatacataaaagcttggaacataatccactttcaagtgtttgctaaccaccgagtgagacaatgaaccaatatgttatcaaacaaatgtgataaacaaatacaaattctccaatcgattaggcagaaccgcagcattagctagtggataaatcaagagttcaagaatcgaacacacaacattcattaacttgtgtcttgatgatgtcaaattgtgaatcatgactcaaaatgtattacaaccatcatcatcattaggcctcaatgcatctcttgtctatgatctaaaacgtatagacaacacaaggaacaagccgccatgagtgatctgagacaactttccttaaggtaagtaaactggtcatggcatttaatgcttttgagtttcagagtctggttgatgtataagggaagatttttaagtttagataagggaagtttcacccaaatatcatcttttggtgtcgatcgatatttcatatttgatattttgtcccacatttttgttgataatgtcaatattgatattattttatgcatgaggtcttgatatcatagttcaattttcgttttagtcaaaattgatgactttttatttttcattttttaaataactaataggttctaggcctaggggatttggtattatgttgtgcttatatataggttaatttgtttatattcttttcagatataatcctattagaagatagcatattcgatataagtttgtttatgattcttaaagtatattctccttgtatataggacgatcgtagatatcactagatatggggaactgtaatgcctttatattgaaatcaatagagaatgatctcctcaacggagactttcattagctttcaaatccaacatacttattaagtagggctccttcatctttttcttttctcctcctccatcgtacgatatgtcttctccagcagcctccaccaccaacgagccacggcacgagaatattcatagagtttcgtcgtcatcgttattctcattagtaaaaggactcataacaggtttactccaaagtcaactcatgagacgagctataaacttaatcaaccgaaaccctagaccatacgatattgccgcggaccaatcttctttgttgttttcgtcattaccttatgatgtagttttgaactgcttagctcgtgtctccagacgctactacccaaacctctcttgtgtttccaaaagcttccaatcccttgtgcgttctcctgagcttgcacatatgcgatccttaataggcaaagatgatcccgtcgtttatgtttgcttttccgatactaagccttttttgggcaggagacttgattggtttactttgaatccaaacgagaagaaaacaagtgttcttaactcatttcaggttttttcttactatatgttgtattgtccctccgtctccataggttcaaagatctacttcgttggaggatgcatgtacaaatgtttgccgggcctattgatctttgattcctggtccggcgagttgtgtgtgggtcctagcatgaaggaggctcgcatgttaccgggcgtggcagtagtaaatgggaaactatacgtaatgggagggtgccgcgaagaccaaatccaagtggaggttttcgacccgaattcacaaacttgggaagttggacctttaagttcagatggggaagtccgatacggaaaagggttaatgcgatatggagcaattgtgactgaagctgtagcattggaagggaaggtttattgtatgagttataaagatgggagtcacataatctacgatacgaaagatggaaaatgtgagacttttttgatggcagatggaaaggcatggaggagaggtggagtgtgtgtggtaaacagtgtgatctatgtttattacattaatcttggggtaatgtggtatgaccctaaagataaggtatggagagaggttaaaggtttgaataagcttgattataaatcaattgacatggttgggatggtggattgcaatgggaaacttgggtttctgtggggaaataacacgagagaaattattagtggaagaaccgagaagaggatttggtgtgagatgatcgtgttggagaggagtggagtagaaatccatggaacggtcgagtggtctgatctcgttggatttgttcctcatgactatgaaatttggcgttgtctaggtgtttcttattaaaacttagtttatgatggtaatggtgtgatgacgttttcttactttgtgaattaccatattactaatatgttgcattggctgagcagaattgtgagcatcacagattaaacatgatttgcatctttggttgcttttcatttttaatatagcacttacgataaataggtacctatataccaaaaacgtgtatttgaaaaacaaaacaagcttttaaacttacaaaaagtaactgaaggttataaaatatataatcctatttaccatgacatttggcgttgtctagatgtttaaacagtttttcttgtagtagcatttctgatcaaaactataaaagagatgcttatgatagtaatgatgttgtgaaacgttttcttactttttgtatgacaattttattaatatagcgtcttacttagctaaaaagttgatgtatgacaattcaacaatagaattgtctactctagatgatcgactgttgtatctgaaatctagatatacaagtttctatgcgattttgggcatttcagtatatgtcatctaaattcgtatccaactttacgtggttcatgacttgtcgacttagagtaggattagaatagatttggcaagctagttttacaccacatgtcacgggaatatccgtgtgagtaggttggctcaatgatattgaattattgatatatacttactccaagacttgcccacaacaagtggagtttagcttttaatacgagtccctcggccatgattaggggtttggggagagaattaacgtctgatcaagaaaatatcagaggagtaattaggaagaaaaatccaatcgaaatgtacaagatttgtctaaaacacaaacaacacaatcataatttatcctttttgataattttacaggatttaatcacgcagtagtgtacaacacacagtagctttgcgatgagcttggtacaccatctcttcttttcccgctcgcatcgaccacaatctagccgtggtgtccgatgatgctaatagtacaaagtgaaaaccagtttaaatactcttttgtctcacacaagttttccagtgtaaagagattaagtagtacctgttacaagatattctccatccattgagaagtcacagtcccatacccatctttcatgacctgttaaatgatattgatgagagtgtaaaagagaacacatacccctttcagaaacacggagagaccatatacctgttaaaactttctcaagtttgaaaccatcaaggttccatattttgactgttttatcagatgatgcggtcgctagatatctgctaacaaatatataagaccttacaaaaagaaagaagacaaagaaaacaggttgcaagagaaagaagaagaaacacataattacttgtttccaggagaaaggagacatttaaggatgtggctattatgagcttgtagcttatgaaggggctcaaactcggtcatcgtctagcaaaaaacacaatcaaatttttaaatgacatgaacaattatttcagcataatggaagaaagaaagtttttcttatgattagaacagtacttgtctttcacacaaggagcgccatacataacatgttccacggtcgttagcagcaaccaccattgtcccatcccacataaccgttaaagaccgtataggtgtaccgacttctggtacctatatatagttatacaccaaagtaatattatatatctacagattcttagaaaatgtaactaggataaagaaatgtaccagttcacagctacacaaatctgctctgagatcccatacacgtatattaccgttttggtctccagatatcaattcagtctataaaaaaggataacaagtaagacaactaagccgattgctacaaaacaacactaagatatgtacctgatttgggtgtaaaacaactgtgttaactggtgaaacacttctaaactccctttggcattctcgaaccctgcattttcggttcacgggtcaaatcaaaatgagcattgagctatatatagaagagagaaaaaaaaaacatgaatgtgctatatacctcaagtcccagatcttaacagagccatcttctgaccctgaatacatcatgtgtccagtatattggaatcctaccgccataacatttttggtgtgtgatacaaaattcctcacctaatgtgcacaaagactccatcaagatcattcatatattcaatcaaaaggaaagataaacaaacaaaaaccacatcaaaaagaaggatatttacaggtatatgagggttgtaggatctgagatcaaagagtcgtatgtgaggattgcaagctgctactagtttacccttttcaggggttagctcaagcctattcacatgctgaatataatacaaaagtttcagatgaaatgtcaaaaaattaaaaaatgcatatgtcacagagattttagtgttgagaaaacacacaccaaatcaggatagcgaaaggaaaagtaacagcgaccggttcgggcttgccataatcggatggtttgatcatggcttgctgttgcgagatacacgggactatcatccggtttgttttcaaacattatttcttcaacagaagaagactagggtttcgcaaacgtttttttttttttttctgacaatttggggatttatgctgaatttcagaccaaaaacaaacctttattatattaaaatacactattcattatctttcccttttttggtcaaatatattaattatcttaaatatgcttcaattttatatatatatattttttattccttcgtatttaagatatttttcctaaaaaagtgaaaaggaaaaaaaaagaaattttaaattgctgagaaaaggacaaaaaaaggcaaaacaaaaaaaagtatcagtttatctaaatccaagtcaatattctaaattataatcctatataaataaaaactcttagtattcttatgttaatatgtttggttctcctaataataaaatctgaagccaaaacgatatgtctccttcttcgaagaagtttaagaaacaatcttcctccaaatcagttaagccaccgctagaagataacgatccgtccttgccatcgtttacttcattgcccgacgaaatcgttttggactgcttgcaacgtgtcccaagaagctattacctaaacctctgtcgagtctccaaaaccctaaggtcccttgttcggtcacctgagctctcccgtttgcgaactctcctcccaaagaattc

SEQ ID NO: 263 - DNA, 45943 bp, Arabidopsis thaliana
tagatcctatagatgttttttctttgactctcttttttttgtttcatatgaatggtttgtcactttaagtatagacactgagtgcctctggtataatgtgaacataggacttctgctttcaaggttctctgagaaaggcattacaatccacgtaggccctaatccaattgagagatccattgtgtggacgatgacaattccagaggatattgctccggtacaattaattctcaatcacttttgtttttttgtcatgtatgaaaattagttcttagaatccagaacttgcaacaagaactagctccctaatctggtccgtattcttgtttaatctcaggataagcatgttacttcaatatgtgtttcaaaatttctttgacgtttggatcatactcttctgtgttgcaagtttcatatcttcgtaattttagtggaggtagtcaaagctattatttcatctttggatagtctttgaatggcaggagttttgaaaaactattttgaaagtcttcaatatttcttagaaagaaatcgatcgaagattacttcattacacctgacattgaattgcgttacatgttatgaaatataacaaaggaaatgaaacccttttgctatgggttaaagggtctttgaagtcagtacttgactaaaactatatgaaacatctgtatccagtatcttattttactctttattaacatcctcttttctctggtgcagcttttcccccaagggcccaagattccttatttgctacttgtgtatgacgctgaagaattttgtaatcttgttgctaatggaaaatttctagaaatcatctcaagagttcaggacagatacccatcttatacggtgtgctgcctcacgaataagttaatgtcctacgtaaagaaaaggtgtgtttgataaagtgatttggtgttatattaatgtttccgtcatcaagctgaataaaaccaatcttctagggaaaaggaagagtacaaaaatccgggaaattggagacggcctcctatcgatgaggtaatacattacctagtgataatgtatgtagaggaaagcctatttgttgctcctatgtttgtgtttttaaacatacttttggggcatttgatatgtattacacaggtacttgcaaaattaactactcactatgttaaagtacattccagacactgtgtagacgaggctgaggtggctgaacatattgttggcctaacaagcagtctggcctcttgccaattcaggtaccaaaaatctactattttgatttctcttacagaagactttatctcgattgatgttggatggaatttttgatttctttcctcaatgaatcccgttagaccaatcaaagcaataatattttgatgaaaacctgtgaagtctaaatcatatacatcttcacgcgtttaacaacttaacgaaataaagatctaacattgggagtcatcacaaaaatgggcagtaaggcttgtcttgaaataagatctgtaaagcctcttatagtctttaaatcatacaaggctgactaccgaatatctgggaggtcaacattacgtagagctgtagttgatagatgaacgtgtggctaataatgtatttctctgcatgattttgaagtgaaactaatcatggctctactatgtgatgcacaggaagaaattaactatgttatcagtaagcgctaatggtgcattagtctccaaggattcagttgacaagcatttgattaaaaagagtccatggtaaagtaaagtagaacattttgaaaataggttgtgttttagtcattttgaatctgttcaataagtaaaattattacggtctataggttaaaagcgttagtagcaataccaaaggtacagccacgatacgctttagcagtgtggaagaaatatccctccatgaagtctcttcttaaggtttatatggatcgtaacaaatcggtaagtaaaaacatgtgagacatacttggatttgagtttcttcttagtttgttgtttctaaagcaattgtgtagtgttggttaaacaaatgaagatgttcttttgcgtctttttttttccaggttcatgagaaggagtttctactaaaagacttgaaagtagaaggtttagtgggaggagacataaggttaggtgagatttgttcaaagcggatatacagagttctcatgtctcacgatggagccattaagactgatgacgtcgaaaatggtgctgctttcttcaccgattctccaggtgttaattagagtcaaagagcctaagatttcttaaacatataagataaaataaaatcatttcaaccacactgaaattttgttttctctttttagatcagtttccccgattcaattccgaacaatttgctctaagtaatagttattctattctagaaccaaaacgttaaaagtaaaattccttaccgagatagccagacgtcattggagactgttgccgacgacatttacttcggtgatgaacatgacgaacacggcaagaggaattcggtttttctcctgcggcaactgattcggcaagacatgctgaccaagaggacttaggctgtttttgttaacgttgtttttacttcttagtacaaaaaaagcgaaaagtaaaaaagttctcacatcgttaaagtttaaactttataggcacaccaaaagatgaacaaatatgaagatacataacatacaaatgaggacaacaaaatgttacaaatgaattgaatcagtaaacacacagttaagaaaaaaagaagataaaaaaaaaacatttgtaaactgtaatcattacattacaataccaactatatacagtagcattataaatcaaacgatttttaaaaaatttggcaaaaaaatgaagcagaagtttcgatttaagaaacctctcaaacaaaaacaaaaaatgaagtggtggtttacttgttagaccactggaattctatctcaaggtttctgggaccacttttgctttctggtaacaaactatattcacctgcgactgctcccagcatcaccaccctatcgatttggatcgttactttcccaaaggaactctgcagaaagaaagaggcgaaaagccacagtttcagttaaaccggcaaattttcaaactgtaaaatacgagtgaagtttgatgacatacctttcccattttgcttttgttcttgcatgaaatgtggagtttttgacctttgggagggctctcaaatgaccatgagaagctctcgtcccactctggattaggacctgtcgatatcacctgagaaaatcgaaagatacggttgatatctaaaggaattactagtcacagtgaattgacgaaagggtgataagtcttttcctaccttggtctgtctaggaggattgttgccgagtgttatcttgcagaacacactcgggttaccaacggattgcttcatgttgttaccacgtttgatagtgactaccagagtacctggcaaacactgcaagaggaattcagctttctcctggaaccgtggtggacctgattggattaggtactgaagtagggggatggcgtctgcagcagcaactgattgggccctggaaacttcggcaggacaggctgaccaagcttgtctgagaagaaacaatgcatccaaggcagcttcttgtgttgcttctgatcctgtcttgagggatgtaactagatgtggtatacttagtgttgcaggctctgtagctcttagacgcgggaagttgttaaacaaagagtttaaggcttttaggtattcatcattcacggttccagtggcccataagtctttctcaatggcagctgcaaattaaaaggaagcaacatctgagatataagatatataataagaatgagcagatcgtattgatacaaaaggtacagagattttctcaccagttattgctctgacggtttcgctagatgcgtactcttgaacggtgtgattagagaagagtagttttacgaacattgcagcctgaacagacgtttcaggatcactggaactgatcagatccaagacgacctgcacaccacctgcctcggcaactgctcttttgttagatcggctatacatgacgagattttgcagagcacatatagcaactactttcatttcttctgtgggttgttcttcaaggacattgactaaagcacggcaagcagaagctgcatcggtgcttctagcaagagcttcattctggaaaagatcaccaagggccaaagttgctagtaaccgcgcctgctgagcttgagtttgtggatccaagaggtactgagacaatggcaagattgcagtcttggtggcttttgaatctctaatcttcacgttgttgagcagtacctcgagcagtctcgctgctgtgtcctcacactgatgagaccttaaaagatcaagcagagcttctatggcaccactttcagccatggactctgcactggttccatcatcgctttccaacactagaagagcgttaagtgcaccaaccacggtgttttcagatgcagaacgaagcagtcttacaagaacagcaacaggaacttccaggtaaaattcggagctaaattgcaagatgataaccaaaattgatgctgcagactcccataacacattggagagcgatggatcagcttgcagtatcacctttgacagctcactcacaccaccttctttagctatttcatttggccatgttagagcaatgctgacgagagctttcacagctctctgctgtaataggtgtatgccggatcccagcacatggattagaggaccaatcgcaagttgcgttaatggatctttctgcagatgctcctcgtagagaagatgagatagaagctcagctgccaactgctggactgctggggatggagattccagtagcggaattaaaggctcaattacttggtgcggtgtaagtgtataatcagcgcggcattgtggatgttctaagatatttaccagaacttgcagagcactgtgctgtccatcagctccaaactccaacctcgtcagcaaatggaaaagtggctccaccactttcgcagcagattgtcccttggcaatagtagcattatttgtgaggattcgaagcagttctgaaaacgcagcacatagaaaatctggagcttcgtggagaatatcaagtacgcagtcgataactccagctttcaccatttccagtttacaagcaggcctgtccttacccaactttactagagccctggatatagcctcatgaagcacatagtttttaccatagagaaggccaacaagaggtaccacagcgccatgagctgcaactagttcagccagttgttcatcgtcgacaagcttgtccagtgcacgcacaactgaatgctgagcagggctgaactcagtcacaagaagagagacaagtggctcaacacaacgcgctgcagcaactgtagatctaatccttgtatttgcaaacagaacataacacagctctgcagcatctcccttcagttccatcgtatagtttgaagaaaggatcctgcagagaacatccaccgcattcatctccacatctgcaactgccagagcccgtgatggattatcactcaacaacctaacaagtgcagcaatagcagcatgctgctccctctctgaaccagtgttgagaatctctaccaatggctgaacagcttgtctagaagactctgcatttcttatatggtcagcagtaaagagactatccaatgccttggcggcactgtaccttgccccccttccacctagacgcaaaacagctacaagttggctgaccgcgccaaatgctgactcatgccttcgaatttcagcactgctaaataagatgcctaaaagacctgttgcagcttcctcttgctcgtcctgaggtccaagggaaagatatttcgagagaccctcaagagcacctgactctaccatgacaatcatattttgtggacagtccccagcaagctgagttagaagattaagtgaaagtagaggagcaccggggcggtctggaattggtttaagaagttcaactagtaagggaatcgcctttcgagaagtagccccaactctaatatcttcaactcggaaaagcctttcaagggcaacctggtctgggtaccgcactaaagtgaactcctgcgacagctgcagaagttcttttatgtcatcatcagaacaaccaagcaatgatataaacccagccgcagcaccggagtttgcaacagatagaagagttccgcgactaccgttacagacaagactagctagagcttgtgctgcaaaatatctgtctgcgtattcctctgacttcacaagatttgagagcactggaacagccttcattgttgcatgtgcgcgagtgatttctctgtcttggaaaagtatggccagcaataaagcacaaacccaaatgttggcatcttctccattatcagcctgaaatgtaaaaaaggtattaaagcaacataaacgacaacctagcattccaaaatgagttagaatgttaaacgctatcacagattcataatatgtttttttttatccatacttctgaaactttgataagttgtgatctcaaagattttaatctataagagagttgaatacctggagaaaacggttgcctattctgtcagtaatcaactcaatgccttctgactccaatattactgctctgctcttttcatcatgacaagaaagaaccgagagcaaccagatggctaaattgtctccagaaataactgttgcccccgtggaaccctccctattttctgttgcctcttcttcttcatcttcttccttttctttgggatgaatgcatatgcagattttatctttctcatccttttcctgatcttgcacagaatctaggatccccacaagtgcttgaacgaatttggcacacaattgtgtctcattcagattttctatcatcttctggtcgtcaactttggcagcacagataataatagcagctccaccaatttttattttcgggtccctggtatttatcacccttttagctatagatgacacgcaatctctggcattgttgaccatgtttcccaaaacaataggctgatctcggcaaagtcttgacaaaacttcaatagctttgtcctgtagtgaaggattagcaacactcactatagatgagactattggggccatactgttgggagattcagccaaaacagcccaagctggttttacatttccattagctcctgaccttgagaatatagcaagcgcatctagggcctctgatattgcatcagatcttccatcggcagattctagaagagacactaaggtaagcactgttccagctcggttcacagaatctgtcaatgcagaatcaattcggcgacgactaaggaggcgggcaattgccgcagcagcaagtgtcttcccagacactgtaccttcacgtaagattctagtggcggacaagatgatatcttcgacaatgaccttctctgacacttcactgtccaatataagattagccaaagcgcacattccttgctcagcaacttctagaacagaagagttggctagagatactatggtaggcaatgcttctctggcagaaatggccacatcgcgattctccttaattgaaagtaaaattgcagccaggcagcggcaagactcaacaaggatcctctccgaatccacatttaacagttttatggccgacaagagagttttgagggctagagcactctcacgcaaatcctttctgctctggaagatagctgcaagagctgatgctgaatttgcttgagtttcttctttaccagagctcatcaacttgatcattgtctcaatagcatcattggaagcactgccttcacgtagcatgtcattgaatgggaccacagaaagcatactcttcaatgcatccaaaacgtaaattttagactcaggtagatcactggtcagcaaagcagtaagctgactgatagttgcagtatctgatttatgaatcaaatgattcaatgtcttggcggcaatttctttaccatttggactaccattctttagtagccataagagagcagggacagcatccgcactttcaacacaagcacgtatatcttcgctatgattgcacaagttcctaaggatagttgcagagtcttccctggctttggccgacccagtctctagaatttgaacaagtggaggtatacctccagcagcagtgatggcccacttgctttcatcattttcgttagacaaaaggcaaagaagtgcaacagcacattcttgctgctgttcggatgaaagacccaaaagagatattagcaattggatcccttcacggccctgtagtgcttgccacaggctaccttcatggttacacagcatcagaagagcctttacaagctcatcttgaacctcattcaccgccatcgttattagaccaacaagcaaacgttttgcatccgagttggaaagtttgacagagagtatggaattcccatacaaacttgcaagtgcttcaattgtacgttcttgcaccaagaatggtagacgaggcttaaactgcttcagcagagtctgttcaacgaccaatggatctgatgctcttgtagtttctgccttgccatcatatatcatcaatgctgaagctaaagccccaagggtgtcggcagtctgagcaggcgaagagcaagattcaaggctctgaccaaggcttgatatgacatatgacaaaccaccggaaatattagcaagggcacacattgcattttcttgtaatgcttgcgcatattcaccttgcatgaattctttagatggagctattgttgcatttattaaaacaggaataccattagaattagcgatttcccgctttgcttccttagattgagcagaaagcgacttgagagcagcagcagcctctgccctcactggggcttcattacccgatcctaataatttgagaagctgttttgtaatgtctgcagtcaatacactggaacaaacagaggcgtcttccatcatcatacacgcaagaaggaagcagacattagatagtgtacttgactgcccgcttgtgagcagcttcacaagtacatccactcccccagctcgaattgtctcagaccaaaatccctctgtggtactagaaaggttcttaagtgcaccagttaacaaaccatcaacctctccttttttatttccactgcgcaattggtcccacagaaccggtacaactccctcagtggaaaatatttttgatccaacatggtctttaaccccaccttcagaaacagcatagattgtctttgctgcagcgatctgcccttcgactgaactggacttgagaagaccaagcaatggaggaatgcatcccccaagtaacaccttaactctaagttcgttctccttgcagagtgaacccaagacggttgcagcttgtatcttcactccaactgatcccgatcggagaagagagacaagtactggcacagcttgggagtgtgatccgacagcactgaatgcattctcacgcatttctataaggtccagtaactgcttcagacaatattctctttcttgtgcagatgatgaaccttggcgcagctgctcaatgcattgggcaacacttgctaatgtcccatctggatcttccatgctggttgtccggtctctgcaggggatggggaaagttagatactaattcgctaataggtgtgcctttctgcttaaaatgtctcatttgaaaggataacataggaaaccaatccagataatattaatttccacaggcattgttaaaccaagatggtggtgcaacaaatacagataaaacctcaattttatcacgatgattagctcccatgcagtaccaaatacatatatgcgttacctcaaactcatctttgtggttgaatgtggagttgggggctctgaatcatgcatcttcatatccccatttctctcctgcaatcaagaccaaacaacagaaaataagttaaaagagcaacaagaccttttcgctcctatgcaatggaaaaactataacctttatcatgacactctatcagatataactgactggtacaaagccattaattaacaatggacttagctcaagtacttttttcaaatcagattcaaaatgcaagggacatatcagcttaatcatcctgctaatacaccagatctgactttgcaactcagaaagattgcagtatatcaactaaacaagcttttccataaacccgtgtgatgaatgttaatactgaatcaagtaattattaccgtgtcacttggggcaaggccatttccattagtggaaggaaatctccatccaagagcacttgtcatatcttcacttcacttaaaaaattctcaaatcaaaagtagacccagagaccttgccccctacccagatctactcaaatcagatcgtcagaacatcaacaacaccccctgcataatatataaaaaggatcaatctttacaatagaaaacgatacagtgaagtaggaaaagctcaatgcaattatattataattgaagactaatagtataaaaatatcactctacctaactgaattctactactgctaaatctcgatccgaatcgtttaacattccagattcgaactaaagctaaatgaggaaactttttaaccaataggaactcaaaaaacaggattcttcagatctagatcataattggatctctatcaatgaaatcaaacacaagagatccgataattcaaaaagcatgcatttagacattgatagatcaaattgaactcacctcaatgcaacaaggagaagaagatgaacaatctgttacgtagaagagaagcgaataagacgagagaaaggagagaggagtgagagagaggtttcttcttcttcttcgtctgtgattttgactcaacaaagtataaagcgggggagagagagagggaagagagagagctgtgtgtgtgctggtgagagagagtgatcagattggagccggctttgtccaccgacagacagcgagtggattcacttagcgactcgagccggcttgagtcggttgtcgagccgacagaactaaacgactcttgtacagcgaatggtatacttaattgttttttattactttctttaatcaaaaataaatgaggaaattgacttttagctgtgaattaattatttacatcaaacattttttttgttaacaaaaattatataactgtttttttccagcaattagccaattagtaaacattttggttcatttgttcaagcaaaattttacattttataaatttgattaacctttttatccaaaacatccgtagaattgaaacaatataagaaaaaatattataccacaaaaattacacacacgaataaaaatattgtctaatttatttctcagataataacttaattagttaattgtctctaagtttagattatgttaccaaattatcactcatggggttatctcgattttttagtgcaacacagtcattacaaatatttatttaatatttttcaaaaggatatcaaaaataaattgtctattttattgtgtcatttaacatgttgaagtaagttatgtaataatcaaaagttatctcttacaagatcaatcggataaacaatcaagaaaaaataataaaatatactgatgaattaataaaaagaataatagtaagatctgcagtagttgttgttattggtcctattatgttgatttgttaccaaacttgattaattagcccataacaatggcgatagtaaaggtttctatctaccaccaattgtcatccacaacataatcatcacgaattctatatatatggacaaaaagtataataactatttttacggcttccttcacatctaaattattttccataattgttcaaaaatcgcgacagcagttcttttcgtctgaaagtgagagaagtcgggggagcaaattataaggatggtaaaacatataacgtgggagagaaaaagcacatggcctcatggctcatgagaatcaaagattctaagttttaactattcttttgttttttcctcgacgcatgttttgtttctatcgacaactatgcccataaaagcatatgatatgcacaattatgataatcatatgaatgcacatgtgctctttcttcctagccaattatgatcattgacgatcatcactataccataaaaatgactggacaaagtcatattctttgatgcttcttgtcacaacttgatacatccactttcccgaaccgtataaaacccaagaagcaaaattctcatatagatctcatagattcgttcgaaatatgttaaatttgcatcggatatagaaggtgaaggctgcgtctccggccggtgaaccgtcgttttactgatcttgtttctattatgttccgatttggaccacttttttgtaacccgtgaaattcttagcccatctgtcaatagaccgtttggaaatgaatatctaaaaaaaaaaaaaaagatgtgaagtccatatttaatcagtgcccggcattggaacgtagtaagtttgaggaagcatcaacttgtagccgtgaaattaatattatggtttttagtggttttaatttagcgtgtcataagtgagagtaaaagaactctttgatatttcattttcatacatatataatttacttcaatataatggtttgatgagggtcttatcatacatttgattttttcttttattttagtgttacattttaacttaattcttacgtacatcttttcttaatagactattttctcattattatttttggtttctctctctcattttttacattttgattttgtttgcaaagatttgaaagtcatctttgccaaaaaaaaaaaaaaccaaaaaaaaaagatttgaaagtcatcatctagtcctcttgatgagtagattgtcattgttttttttgctaaattgtaaatatttcatagataatgaaaacagtttaggttgtaaacatagaatctgagacctatagatatggtaatggatccaagacaaaaagaaataaaaacatatagacactcctcctctctctcttttctacaaatcatacaagtttcaatcatacgcaatacaatttaggtcagacacaattatatataaaatcaacagtcactgagaaagaaaacagaactaaacaaattataagttttaattaatatataaaattttcgatttattttaagcttgtaggcttgtagcattcaactaatttataggctgaatagaccactcgtgttttatgcaagtctcacaaatttggtaaacgttttggcgaaattcaaaaattaaaaacttcaaaatagattgtcaatagagatatatcttacatgttgattgaaatctacgaaaatatacaaagttttttttaatacaatcgacattgaaaaaaaaaaaaaaagaacacaaattacgtaacttgatacaaaagacgaccacttgtatatcacatcgcatcacatcacacatagtgacatagagacacataaagtcaactgaaaatagaagaaaatatctcacacttcataattcactcttgtctttctactttttcttaagtcgacaacggagaagacttgaccggaaatactctattaccggcggaagaaacgccacctccttcttcaccgtcaacaccgccatctcttctcttctccaacttctttttcatcatcttctccttctgcttcttctgcatgacttgaagttgtgcatagtttgctcccatcgaagacattttgtgattatagttcgattatatgttagttaatttgattattataatgaacaaagagaatgtgtggttaaaggaataatgaagtgaaggatgagtttggttataatgatgaagagaagttgtcgtaatttatagagaaaggacttatgctttatggccgttggatatgattccattctcatcattatgcttctccatgctcattctctttatcccttgaatttttttattttccttaactttaatcgattcattgtctgactttgacccatttcgccgaatttaaaatagttaaaaaactattgcactgatatttttatggacaatatcagctaggggtgggcgcaaggcgagtacttgctaatttagggatacttgttactcgacttgccttgtacgaataatcaaaataactatttgtatttggcttgttaaaaacgagtacttgtaattacaagtacttgctaaaatatgattgccttgtcatgttacttgctacttgcgagttatttatacatacttgtgagttattatttgctcattgcgagttatttacaaatatttacgaattattatttgctacttgcgagttgcttacaagttatttgcaagtatttgagagttacttgcaagtaacactttcgaattacttaaaattacttattactttatttatcatattttttacatgtttaaaatttactttatttctaatgtagtttttaaatgtgtaacgctaaaacaatacaatatatgtatataaaatagtaaaataataacgagtaacaagtcaaacgagtcgagtattaattttttttcattacttgttacttaacttgtacttgcaagtatctaaattatactacttgttacttgccttattaataacgagtacttgttttttcaaagcgagtacgagccaagtagcgagtataggacgagtaacgagtacttgtgcccagccctaatatcagcgttttagctagtgtatatgtaaacttttacatcctaaaaaattcgaataccagaaaaacaatcctactaaccttgaaactcgcaagcaattgaaaaacatatgtatcattttaagatagttctttagtttctttttctctttattttttgttcttcagtttcttcttgtgtataagtataacatttgatgcttccatgataattaacgacatttaacacccacgttctacgtgttaaaaagggcatcagtctgacacatgaatttcatcaacattttgttttaccttttttttgttggttatatttatacagtgataacaacatttattattattttcttacgttaagagcacaagaaaaaaaatattatgcatttaaacatttataatatttttttaaaaaaaacaaagaaaattaagaagacaagagatatttgtttctagtttcctttccttatttggtgtagttttctggagatatttttatctttcgccggcttagttttcgaaagagtttcgactctaatcagtttaatgtttcaaaaccgcattctattttgtattccatgtttgtgtaatataatgaatcattcggacgcaaataaaaagtaataacacggtagcgacaataatcaattttttaaaaggacattaatattaaagggtattaatcaatattattaaggtacacaccaaaaatataaatattattaaggtacaagttggtttactttttgttttttaaaacaagaatgcatgtttagtcgcttatgataatgtatttattcgtgagttagacaaatatttcatcacgtttaaaaattaaattgttagcgtaactaattataaatagctttgtttttttgttaaagaattattcagtatttttagttcatatatagtgaaacaagtgggtaataactaaaatacatataaataataatcgaactagaaaggaggcattatctacatatggtggccttcgctttaaggtcggctcgtaaggccttatgcaactatattatataactgttaacatttgctctgttttttttagctactatgctaattaaagttgtcatcatttctgtatagtttaaaatttaccgaccattgagtgtccgagtccgaccaacgcgatatctatgactatatactatgtgattcgtacgtatgggacgaacgatagtgtatatattatgatttggaatcatattaccagtttctttttttttgggtaatgaaccatattactagttgtttatgtatatcgaatcagtctccaatatacttgtgtttttatatatttacatctaactccaatcaagaaaattaaagaggagtttggaacattagcttaagtgttatgcactgctagtatgaatcgtatatattatagaaaaagtgttatgcactgctagattcggaaggtcttaccacaagatcgtaggattgtgttggttcaaggcgcagagaacactcacaataaagttgacactgcattgttagtggaacaaactaaagatctactgattaaaaggactaaaatgattggttcatacgttgcggatcagactatgcataccaatattttggcaagcaaagcgtcgaagaataggatgaagcatacattagtaaaaacttcaatattgttactattggtatgaagcttttagctaatggaacaatgaaacaaaaaaggaccaaccatgaatttatgactaccagtctaccaatcctacaattttaatatccatttccaaaatcaacagttgtggtagactagtagtcatatgtctaatgccttttacgagtacaaacatagctggcaattaacttgggtttcgaatgggtaagctatatatactataaaaagtaaaaatgcattgttaattcaattaaaggacaaacgacataaacaaaaggtttaagctatataccacatttgttgaaaaaacaagtaaaatatatataccacatttcataaatgttaactataaaaaattagggaaggggaaggataagtcagataataaccacttatattggccacgaatctcccaccatatatgatacaatattatatattttgactttttttttaattagttatattacaaaatagaaatatatatatacaattgttttagtctatcaactaatgttacaaaatttcacaaaatatatataaagaaatcgtggtaggtaaagcaagtttatgttatatgtgtaatttgtctaaattagtttttacattcacaaatctatgtgttgaaaacgcatatataaaacagacatgtttatatgattatgtagatgataatttatttaagtgtgtgttagtgctaaacggtgctggtacacataatctttagagaaatgtttgatgcattgactttaatttatattggtgcatgtgtggattcagatttatgtttgttaaagtgtttatgttttattttctctctttatgttgataaagaattgaaggcgatcgctctgaattaattaacttggtgcctttcatttcggtttgttaaagcaatgcttatccttcaagaacatgcatgattaattaattcgtccaatgctttatgcctttataaggtttgttcgatttacttcagtatttcagtataatctccaactcaattgattcatcatggtatcgaggactaaatattgtttttttttgtttttctcttactgcgatttcaatcatagttgattattaggtcatttctatggcaaaaatctcgattttcacaaatcttgcggaatataatctagatttcagtcatgttttcttttattatagaaaagaaatgcatcttcaaattaagatgaatatcaataagtaaatgtgaaattcttgatactatattagtatattgagctatttctaaccgttatataaaatataatgtgacagaaatgacattccattcatcgttgtttaatttattgtttggttgaaagtttttataattattatatgatattttttgttttccacttcggttttgttttttcaccttttccacttcttttattttaatattttagctattttctaaatacaataatctagagattaagacagtagaagtgtttggttgtttcgttttgtgtggcctttagggtcaactagggacaaattgtcccctgctctctgtttattggatccaaactcttagttcgtaagctactcttcaaggaaacaaacttataaaattaattatagatttattataatttgtacattaagcaatcataaccatataaccgccgtaactcaaaagcatatgttaattgacttaagtcatacatgaaagctaatttttagtcattattaacaattgtgataaactaagaatttattttgtgtcttagtttatcacaattgttttcaagatgaccatagatttcaaacctttgtaactttgtatttcttccttaccatttgtcccatttttaaaagcttaattatatattcctatatttttcctttttctcttacgattttacattttttttcagttgatcatacaatatattataactaagaaaggaaacactaatgatttattaaaaacgtacgaaacataaacgttgaaaaccatttgataaaatctatatccaaacaagcatttcagactctactatttagagcttaaaacatctaaattaaattaaacgattatataatgaataactattgcttatataaacgtttagaccatctaaaattgcataaaagtcaaattagcaacctctccgtgaagtgtttttggttacgtgattgattaattagatattagtgcttttacataaggtaacatgttaaattctcagactatacaatttaaatccttcccacatgatcttctatgttgcggattaatattgtatgttgagttgtaaatagccagatttatgagaaaaataataatctgaagtgactgaaataataatcgattaatatagtgactgatatcttttggatatttccatagttaatcattcaatcctacacatggcggaagaacttccaaattttattcatatagatgaaggaacttattttattaattataagacattatatattgattacaatttatatctttaacaatcataagtacatacacaattaggaggactaccaattctggatgcaatacattctgcaagtccattgtagtctgtaatgcaggatagacgacattgaataatgtcacatgatggagcttttggatcaatgattatagtacaacttccatctcccttagccttctcaaccactgaaaaaactgaaaaggtaaaataccatgttatgatgtgaaactattctctttcaaaaaaaaaaaaaaatttgatgtgagactaaatatatgtgtcaatgcttagatattttatgtaatgtaaatatgaaaactactttaacgtttggaagtggaaaatgaaattacctgagaccacaagcatgagtacgaggaaataagaatatgatatcttggccatgatcaatatatcgattgcaacaaaaaaaaagaaagctacgtactaatgttttgtaaattagaggataaatgaatgactcttttctttgctttatggctatgtaatgtttatgtttatatatatacgggtatacatctaagcataaataaaaataaatagaaagtgaatgaatgtaaaaaaaatatagggttgactacattgattactatatgcatcttctcaccatgttaaagttatagcaattaacttaattttttcccatgtgtttttcatttgtagttcatagatacgtgttatctctatccatttccatacttaaaaagtgtattagttcaaacaaataactaatacattaacattatcacattatattctctatccatttttttgtgtcatgaacaataaaattaagaagcatttaattttatatttattttctaaggaattcgaatttctttaattggataagaaaacaaaattttgttaactttgttgggtttgtaatagtatatcatttatttttcaatttcaacttctagatattctaccctttgcacaaaaaaagatattctacccttcgaaatcgatgatactcattgaaagtttggaaccaaatgtttttgatcactacggttaaaagttttaactttgaagttaacacttttaacttaaaatatgataaccacaaaaagcatacggactctagatagcttacggactgtttaaactgcttaaaaacgccgtctaagcttcttacatgctgccatttcaactaatcccaccgtcttaaactgtaatcgccattgtaaaaacttgcttcgagttaaaataatccgaaagtaaaatagttatttcggatatttacctatattagaaacaaacattcaacacaagctcagttcgtgaattggagaggtctctgactcaatgggagagatcacggactctttaataagttggagtcttttctttacaaatacaaaagatctattagatttcatcgttctgtgagttctctctctcaccacttgtcaaatgcatttccctgcgtgcagttaaaaatctcccatagttttaatcaaaagccatatagtttcacagaaggccaagcgtcttcagctgctggacatgctcagttggtaaagccgggggagaccattctgaccccgtcatttcgccatctacatcctcgaccacatactcctacaaacaccaaataaagaaggtataaagaaacattgaatgataaacaattagaaaccgtagaaggtaaataaaaatcttacctttgttagcattcttttggcgagaatgtggtaatggcgctgccaaatgcgctgtccaaccatggttgcaaccaatacgctatagaatataccgataactgtaaatagaccgagaattactaatgccgttatgaagagtaatggcaatccggcttcccctgcacctccaaggcaacctccacactcactaactgcacttgcacagccttcagtacatgcggtgcaatctgcccacatacaaatagttcctggtagatggcagtctgtgcatatcctgcatattgatgatatatatgtttattaaatgggagctgacaaaatattttcaatagtgtatgtacttttgttgtgttgtagtttggcagataataaactcgatcatagtagtttggcagataatatagatagagtttagcagacaaaagaagaggatctagttagtattctaatttttcactaactattgtgtaacagaattcctctggcttgtctcaccatttctagtctctgatgtcgcttattcaaacataaatcacccaggaaccaggtaaagcaaaagcccacatattcagcaaactattttttacgaaagtctatcatgtgaccaaatgaggaacacttataatcaggaaaacgccaatgactgaaaacaaaaacaaaggaagaagtatggaaattgtacccaggctggcaacaacagagacacaattcacggcaaggctgtgctaagtcattgcgaacccttcgatcatagcaggttatgacgcatccagatagacccagcagagcaaagaataataaagctcctgcacacaacaaaatcctcatgtaaataaacaccagtagctcatacacacatgtaaaattttagaatcacttggtataaatttctttagtaacaaattttcatgaagagctgtgtaaaacacaaaattttaattactaaattctaatacacttgctttgaaaattcttatttagttaaaaattctacgaggtccagaactctaactgtatattcgtaacgtagccaaccccttaacttttgatctaaatctaactgatcacaaaacccttgcttcacttcctactacgtagaggcaatgaaatcatctaatagcaaactccttacattggaatctaagattctgattgaagcaaagctttaacaaggactgtaggacatatgtacaataataaacttagcattcccgtcttaccaactacacttggcagaggtcttactaaaaaatattatcttatctagaggggaatttatttagatattaaagtttgggatcataccacacatgtaataaaacgtgacctcactgtcaaaaccccatatatgacgaagccatgattgctggtaactatctatgaaatagaccatgtaggccaatgcagcaatcacctgtgagcagatgaagtcatttaaaaggcatgagttagatatattaccaaatgaaagaaaaactactgtaagaaacagaagcacacatgaaaaatgaatacttacaagctgaacagcaagaaatatggataaaatgtctcgagtaacaaagaagcgaaacttcaatgtccgccatttcctatctccagcactgtgaactctcagataatatggagccttgcaagttgtgcagtgcgcaaacgcgaaaccttcctgcaataaaacgagcttaccaggcgtcaacatctgctattcattattttaccatgatactaccaaaaacaccaccactctaatcatcactcatgaaacatatatcaactctgaaaatttcacatccaaaaccatcattctttagttgtttagccttcgaatggttttcgtattcaacaaaaatagaaatttacaacaaaagggaagttcctattcaataacacttacacaggttgtcatatttgattgaaaatggaagggataacaacaaatagtcaaagagtgaaagcgagcattcatagctttcaagtttcaagtaacactaacgacagccaagcatggacccaagttgagctaaagcgtatgaaaaaatggaacctttatagctctccaatgatccaagcaatcacgatgtacatactttgatgttcctttgcatttgcatggggcaatgaaatccctacctgaccatgatcaataaatgagcttgaatcaaccaagtaagttagaacaaaagctctctcactatatcacggttttaaatcactagtcttttataaaaaaagagtttatcactaacactaatctaaatcacatcagaaccattaacgatctagccaattcgaatttcataatccgaattcttgaactgaagttagacatatctatgagcacatgaaaatgttcaacaatcactagcaagaagcaaagaatctatttaaggaagaagcgaatctaaatggttttagaagacattaccatcagtttcaaggcagattcggcactgaatttgttcaccaggtcctccagcttcgagatcgatctcggaaggctcgaccatcggcgacggtggaaccaacggcgacaattccagttcgtccgccattcaatttcgaaatctgggtaaaacccacgaatacccagaaagagagaatagaaaagatcgagacttcgtcgagctatgatccgatttcgttagtttagcatttatcggtaggtttttgttgccgttaaacaagtatgtgaattgacccgtcactcaccggttcttcgccggcacacaaaaaccagaaatgttgtatctttttccttttctgtattttgacgtttttgcccctctactaattcatgttaaaaaaaaaaattatgtgttgcaaaaaaaaaagcatgtctgagcccgggttcgaaccggggacctctagtgtgtgagactagcgtgataaccgactacaccacccagacgtttttgttagactctttactttattataaatatacttaaataatctagtgttctctggtgcaccctattttagaggagttactctattcagagtgttttttttggtagccactgccgtcaacaatggcgaaagaaggagaagaacgtaagaaggagaagaaagagaagaaggagaggaaggagaggaagcgtcgcgaagctgaagaactcgctgtaagagagaagaaaatctcaaaaaaacataaatcgaaatccaaagaggaagagaaaccagagaaatcaaagaagaaatcgaagaaatacgaagaagtagaagaagaggagaaatctccatctccatctccatctcctaagaaatcgaaggagagtaagaagaaacataagagatcatcagatgaatccgaagagatcgtcgattcaaagcctgttacggtcccgattgttaccattgagtctgattctgatttcgaattcgataaggaagatattaagaatctacttgaatcttactctaaagaggagcttattaacctaatttacaaaactgctgagaaaggttctaaattgatctcagcagtgtttgaatcagcggatagagatagttctcaacggaacatattcgtgcgtggtcttggatgggatacaacgcatgagaatctcaaggcggcttttgaggtttatggggagataacggaatgttctgtggttatggataaagatacaggaagagctaaaggttttggctttgtgttgtttaagacgcgtaaaggagcgagagcggcgttgaagaatccggagaagagaatgtataatcgaactgttagttgtttaccagctaggccgtttaattctggaaagccacgagaacaacaacaaccggttgagtctgtgaagattgatttgagtcatacgggtaatcagagtgaaatggctttgcctgggattgatttgggtcatggacttgataagggacatcagcagcagcagaatatgtcaatgtatgctggacagaacatgcccttttatggacattctcagcctcctcctggttttaatcctatgtatggtgcaatgatgggtaatccgatggttgctggtttacagaattatcgtatgtttggctcgggtatgatgaatcaaggacctatgatgccaccgaatcatatgggaatggtgggacaatatgttggtgatggtaatgttaacggtgttggtgcgggtgctggtgctggtgctggttttgatggtgaacgtgcttggtatctgagataagagaacccaagtggtatgaccatgttctctgatatttcaagttatagattaggctaatgattagtccggtatcttcgactccaacttgatattttgggaattgcaggagttttttttgcggatctttattttctatgcctgatgtttcaaacctacttttttagtttcattatttatagtctcttttaacgaggtatctacccctatatgagccattttgagggagatgtgtgctcaaaggatgaattttctgttgctctctggaagtctgtcattggtgttctgctctgttctcataaaccagtgaaatgtggtcattttgtctagaagatttagttactaggatcaatattggtttaaagtagtttgctatctctttgttttcccttttggagtcccccattatggtcttctgtcttctccttacccatcaaactcacgtctggttttcttctgtggcatggcgtatgtttttctcttttgtttttccttgtttttggttttatgttttcccgcattttcattgaatatctgttcgctatagctggagaagaagcttatgacatttatagttttgtccactatatgtcataactgccaaaagtctgtatcttccagctgcagttgtcttgagacccgtttgtaggatcagacataatggttttacattcttgttttaaatctgtctttttgagtactggaaaaagttttgggactctttcaaaagcttcaagttgattttctctggaataaacaacctgagttttctttccttcaagcattgttttcttccccataggtttttataagcttctcaatctctttcatcacattcctcttttatggtagtgtcgcccctttctcttttgtatttaagagtccattttgatatcagttgccaagttttcttgcctaagttcaagattgtttttggtcatcggtacttggacccaatttgtttttcaccttacatagctttgttctggatttaccttttttttacctgctcgttattcatattctatataactctggttatggtagcaaagcatacttgttttttttttttttttctttggattttcacaatgacctcacagtgaccgatgatgcgaatgcttgttttcttaagaggatcaatcttgttttcagtttttcgatttcttaagaggatcaatcttgtttctcggtttttggtcttctctgcagctatccatccatccatatgaatcaactcgtattaatctatagtatgcttcagctaaatcaactttggtttggttttggtcatttgatttcgttgttttgtgatcatgatcttatgagggctttgtttttctttccaatggggaaactctgaaaatcttaagaacaaaaacaaaaccctctctaagatctcggtgactatttttttagtttctcataacacataaagataaaaaagaaagaaaaaaaagtttcaactggtgaatgaataaacaagtagcagagcgacaccaccaatatggctaaaacctctgcctagccaggaatcttttctgacggcgctctaaaagaaaagtaccacaaagttcacaccccgtaaagttagggagcttatggtattccggttgatgtatagccatcataacttaaagccagcatcttgccatgtaacctctacaaagatctaaggccttatcttaaatataaagcaaatatttaaaaatatgtaaaataataaaaatattcaaaataaaccaatccaaaaataatctaaatatttgaaaatatattcaaagcaaaatactcgaataaaaaaaaaattaaactgaaaaaatcggaaaaacgacatctcgaggataaagtaaatcgaactcttgacccgaggggaaacaggaaactgaaatcaaaaatcaaaaatcaaaatccctaaaagcttcttgactcgtttatcctctactacaatggcgaaaaccctagacaaatctaagaagcgcaaactcgtgaaatccaaatccacgaatttcgataagaaacagaagattaacaaacaacaacaacaaccagaatcctcaacgccatattcaagttcaagctccagctctgattctagcgattccgaatcagacaacgaattcgacccagaagagctccgtgagcttctacaaccttattccaaggaccagcttgtcgatctagtttgttccgcttctcgaatcggatcttcgatctattccgccgtcgtagaagccgcagatcgtgatgttacacacaggaaaatcttcgtttatggtcttccatgggagacgactcgcgagactcttgttggagtctttgaaggttatggtgagattgaagagtgtaccgttgttatagataaggctactggtaaggctaaagggtttggatttgttatgttcaagactaggaaaggagctaaagaagctcttaaagaaccgaagaagaggattcttaatagaactgccacttgccagcttgcttctatgggtcctgcggcttcaggaaaggggcatgatcaacctggtccggtgaagattagtatgggttcgatggctaatcatggacagcctcagcaacagcaggtacaaggtcaacatgtgtttaacggtggtggaatggctgcttcgccgtttatgttagggaaccaataccatccgctttatggagctgggatgttgggaaatccagctttagcagcagcagcagcagctgggggaggttacatgtatccgatgttagcgggtgctctagcacatggcgggttgggttctgatatggtacagtctagtcaaatgggtgggattggtgttgatccaagcgttggtgctgctggtctttcagctctaggttcttactttagaggtcagagtctgcctagtacttatcctgattcggatgctggtggaaaaagagggacgggtaaagattcggatgctggtggctcctcctttcatggctactcaaactattcatggtacgttcactgaaacctttggtgttttgtagcaatgtttgtgctaatattgtggtttgaatgtctttggataagcataaattcattgtagctccgtcatgtgtagataaatggattaaggcttttgtggtagtaccggaattttatctgacattattatgcctctctagtcaaatagttggcttaaatgcctaaatatgtatattcctaggaggaactgctacaggaattaaatacctaaattatgttctagaggtaggttagcattgtcatcggttgccgtaattcattattcatgaatcttgcttcgactctatttcaagtagatgcaatgtgacccaccatacttttgttttttttgttttctccattatttttccttttgttggtttatgttttgttttcttttctttactgtccctggttttacagttttctcaagtgccatttgttttatcgaagttagtttctctataggttggtgatggtggggacgaatattgttacattctttttgtctcttggctttttttgttttagtgttgcactgggttttataaactgaacgtccaccatctctccactcatctggttttggtgctaacgtctttaaacggactgtaaactatagcatctgttcatgctgttgcactcatggttttagacttaagtttgagttttaacattttttttatgtttgtccctttgatttctattgttttcacttttcggggttatcttaccagaaagatagagcattgctcttgtttccatatgtttttctttttgtcttcagcttttgatagagttatgttttgttttgttttcttgaactccaacttttgcagatggtgtgggctgagcatgagaatgataaacatgcagtttctggggatttctttttaacatttctatcaaagtcagtacgttttagtttttttttgtattgttttttcttcctttctttttttttctgtttgatgtcactcttgtccgatatcatacgatagacagtctgtggctcaagtaatatcattgtgattattcgttaaagacctctgtgcaatctgtattgtgacctctggggaaaaaggtttgctctatgaggactcaataggatttaactttcttttaactatttatgacagctaaagttgacccttgaagttgttatataaatttgatcgcatttgatgacctcatagagatatgcatatatcattaatgatgggctaaagaaaagaaagctggtgccattggatctgaaaatgttacactaaacaaagtcttggtttatggaacaacaaagacacagttgaagctaaagctgatgatgccttaagattctctcctcttcaggtaaaaaccgataacaagttttgatttttgaatctaaaatgttaggagatcaaagcggtttgttcacttcttcctcttctttggtggctgaagcgcttcctcatcatcttcatcttcttcctcttcctcctcctctacctccgcatcctcatcgtcgtcttcttcaccaccatcatcattctcgtcttcatcctcctcctcatcttcatcatcgttctcatggttatcatcatcctcgtcatcgttaccatcatccccttcaggttcatcatcattatctccagcttcaccgttcaaatcaggatcacttaccggtcctttcttggtctcctttccttctgcatcatctgcactgccttcttcgtcttctcctccatcatcaccactatcatcattgtttccattgccttccactgcatcaaccacctcatatccattctctataacatcacccttcaagacagtaacctgcagcttcatattcattttatcactaccagaaacaatcttttaccaagttaacatgattttacaaattgggccgacatactaaattaggacatgggcttcttctagacattaaatttgaaaaacttggaagcataatatatggaatatacctttttgattttttttggacctacaatttataatttagattttaaaaatctatcttaatattccccattaaaagcaaccgtcctcaactaatagctattattatatacataccctcacaatatttaaccaaaactttttaattttatatatttttccaaccacccattctgatgaagtaacgcttcaagtcggtcaagatttagttttgtagccaaaaaaatttgtgtgaaacttttgtgtagaaaaaaatctatttttataaagttgttgttttgtgcgaccgcgaatacttgtaaacgtttgttaagaaggaaaaaaaaaaaagttgaaaatagaaaaagcttgcctgagagaagagctctagcaaagaagagagcatagtagccgttaaagccaaagcggcgcagtttagcactaaagcgttaccgagaaccagagacaacctcatactcataccttgttctttcaactccattctttcttcactctgtatttaacagttatgaaaaccgttagatctgcaataataataactaaagcaaaattttcagacaactttcttgtccatttatcaaatatggagcaatcttcgttttgaagttattgacgagaaaaaaaaaagacaaaacagagcaatcatagaaagaatcatgaaaaacagaggaaacaaccaagtttagaggttgtcctctacttcaatatttgacaacatacaaaacaataatctaagaaacaaaataaacagatacaagaagaagaagaacgtaccaaagaaaagctctgtaattagcggaaaaaggaagaaagaaagagaaaaggactagaagaaatgagctctgttcattaatggaaaaagtgtgagatttgtgatcaaagaagagttgttcagaatctcagatataggagaagagagagatgagagatgaaagagaagagtgtgaagctgcccgtagttgttactacgaatccttagggcagtacgggcagtgactctatgtgatcatctctaattgacctgccacgtaagctacacaagtgtgggctctctctgttaagtcatacattttatgccgaccaagatctttcttcatctatgtattaatgtatgtatgtagtcaatggttagtaaaaactaaaaagaaaagcttttggtaacaaacagaaccatattctcttcttcttctccttcttcttctatacttctttctgattgttccaattccatttcctctttatgcttttcccaaaaatatctcaatcgttcattatatccttctcctttagcactaaagactcacatgccatgtcatcttattctaatgctcaataactatgatgatgatggaacttacataccaattaaacaatgaaagaggaaaacttttgttggtttccctccaacgaagccatacctgaatctgttctgtacaatggcttgagttagaccttatgagaattctttggatcttccttattttcaccaataatctcggcaagaacaaaacccatctttgaaatggtgaaatcttgttgtatctctcactatgatttcccttcccacaagcttggaaatgaactttatagccgtgtggcaatcattgcacactctgagattcttcatgatcctcaatgtggttttatccggagtgctaattagtccaaatgcgattgctagtttctcgctgtggtgccttagaatctgttctttaacctcttcttcgaggtcgtgtagtacagaagctgtgtcgggaacataacccattttcttgatctcgtcccaaatcttcttcatggtcatgtagatctcgttcttctctggatgagtcccgtcttccactccaaagacatggactttatgcttcacttcaatccagctaaacccttgttccttctttactcttccatctttcattgattttcttatcttagcagcttcttcccattttccacaagctgagtataagttagccaaggctgagtatgccccgctgttctctggctcgagaagaagcaatctctctgctgcaactttcccaagatcgatgttcttgtgaactctgcaagcagaaagcagtgaaccccatgtcactacatcaggctcaataggcatcttttcgatgaactcttgtgcttcctgcaataaaccagcacgtccaaacaggtccaccatacaagcatagtggctaagggtaggtataatcttatcaacgtccttcatcatatcgaagtattgacgaccttggttgaccaaaccggcatgagtacaggcagagaaaacaccaacatatgttatgtgatcaggtcttagtccttccatcagcattgtctcaaaaagctcaagtgcttcttctgcgtgaccgtgctgtgccaacgcgataatcatggatgtccacgatactgtatccctctcacagcgtatcaaatcaaatgcccggcttgccgatgtaatgttacccgcctttgcatacattgttatcaatgcattgctgacagaaactgaataaatttcccctgactttacagcactcccatggatttgcttgccatggctcaatgatgccaaacttgaagctacacttaacattgctgcaagagtgtaactgtttggtctctgccctcctccaaccattgatctgaaaaggtttatagcttcaccatacgaaccgtgttgctcatatcctacaatcatggcggtccatgcgactacatcacgatctttcaacgaaacaaatatattcttagcttgattcatatctccaagcttaatgtacccatcaagtaaagctgtaaaaccttcaatcttgagatctttggttcctctttgttctatcagtctccgggcagtctcgacccctccacacctcgaatacatcgagatcaatgcatttaacacgattccggaaatatcaaaccctgtagtaacaatgtgcgaatgaatctgcttcccaatacaaagtttctcaagattggcacaagcagataacacactcgccagagtgaatctatccggcgacaacagagaatccctcagcatcttcgaaaagatatctagagctctgagatcataccctctctgattgaaaccagaaatcatagaattccaagtgactatatctcgctcagccatttgctcgaactgcgccatagcaagatccatttgaccgacctgcatatgtaacgcaatcatagcattccagcttgagatatctctaacaaccattctatcgaaaacaaattttgccatcattggatcaccacattttgcatacatattaagcagtgaattcgacacagaaacgttaccgcgaagaccaagcttaacgatgaaagaatgaacctttttacctgtttccatacaccgcgttgcagccaccgatgcaagcacattcgtaagcgtaaactgcgtcggctcaatcccttccttgaccatatcccccataactcttatagccttatgatattgaccaatgttcttatacccaacaatcatcgtagtccacgaaaccgaatccctttgaggcaactgatcaaagaactcacaagtcgaatccatatctcctcgtttagaataagccgaaagaaccgtgttccatgaaaaagctgttcttagaggcatttcgtcgaacagcttgcgtgcgtgaagagcataaccagtttttgagtagacgttcatgagattattcatcaggtagacgctgaacataagacccgatttgataacacggcaatgaaccaattgcgctgtgaaacgaccattggacttgtttacagatttttgcaagagattggtgcagagttctaacagagtagataaagagagtggaaccggagcatccattgaaactgtagattataaaagagatttacttacaagcttcaaatgaaaaaactcttcgtgagctttcaatttcggtgaaaaatctgtaaaggtgacaattttgcgaaaataagaaacgttaacatgttgaatttggcggcagactgatcaaaaactctctttctctttctttcttttttcttattggtgcaatttattgaaaaattaaacatgaaggactaaactaaataaaacaaacaacaatcaaaactcttaaaaagtattgttataattcttttggttgaacgaagaaaagaagaaaatttaggtaaaaatatttgtgtccactcctaaggtgaacttttgttgtattcactttttcttttagtttaaaccaattattatgtcatatcatacaataattaaaaaaacaaaatttgtatattttttaattttaattaaaagaaattaattatatgtacaatttagactttacaattaaataaaattatatgtcggttttgatttataaaaagtgattaagatttagacttataattaaacaaaattatatgttggtttgaatttacaaatatggagtagagtttagattttataattaaataaaattatatgtcgttttgggtttataataaaaatggttaagatttaaattttacaattaaataaaattatatgtcggtttggatttataaaatagtgattaggtttagatcttacaactaaatgagattatgtcggtttagatttataaaagaataagatttagattttacaactaattcaatttatgaggttttagtgaattattttttttatttagataatactactaattgttttaactagattatatagtaaatttcgatttggtcaattgaaaggagaacataggattaattaatcattttgttaaggagttatgttctcaatatattttatttgtttgtttaatttttaatttctatttaattatttgttgtatgcaatgttctaataagtgttctaggcggtttatatatacttttataatatttatgcataatatcattatttataatatcattatttatagtattatatattataaatgctttaggtgtctagcggtttaggcgctagacattaaatctatcgccctcttatcgctaatgcattttttaaagctgattgtatgacatgacataatgattaggttaaactaaaaagtgtgaatacaaatgttcagccctaaagtaaacccaagaattgttcattttcagcaatgtcatatctaagtatatatacagcagcatcattccatcgacgtttttgttattaaatggagtttaggaataagaccattttaagctaaggaagattccacaacgacaaacaatttaagttagcatcatcagaatccctaacatcttaaaccagaattctaatttcgttccatgaatatgataaagacattgcattgaatagtttgttcaaaaaaaataaaaataaaaagttatgttggggcaagaagaagggaacggcacataaaatcatatgagctaatcagtgagaaacaactaagcaacgcagaaaatcaaatgctttaactgtgcctacaacaccagaccactcgaccgtcccacaaatcacatccccaaccctatccaacacgatcaatttaaacataacctcattgttcttcttcgtgtaatcagactcattcactgaccaaaaaaccgctagcttcccattgtatcccgacattgcaatggtataagatacgtcttcttcaagtgtcttcccatcacgagtgttcaatcttctccatgcattgagctttgtatcagcccacattaattcacggtaattaccccacctaaaataaccatagagcacaccgtctacaacacacagagagcttattctatcactttccatccacatagtcccctttaacctaccttctctcacattatagaaatagcgtctactctcattatccattataaaaactttctcctccagcgatcgcactttctcctccgacgcgaatgtccatttttgcgattcgggatcaaacacttgaatttggttctctccttgacctagtcccgtcacgtatatcttcccttcgaccaatcaaacagctgcttcacgcgggaagggaaccttcatgcttggtccattggttagctttccagttcgagtatcgaggatccataaatctgagcaaggttttgcggatctgccaataatggaatagatctttgatcccaccaccacgttggtagaagataacattgagtgggaagaagggaatgtaattagcggactaattgatactcaatcgcagtcttcttctcactccgagagagagtgaaccagttaaacttcatcgtctcgaggcagtagagatagatggaattcttgtggaagagagatcgcaatcggtggagctcaggcgagcgcactagggacctgagccttttggagacgcaagagatgttttgataatagcgtctcgggacgcggactaagcatttcaaaacaacatcgtcgggcaacgaagaaagcgatgacatcgtatggttataacatgaggaggaactaaggcttatttcttcttgcggcgcctcttcggagttggaggcagttatatatataacatgaggaggaattagggcatatttctactttttgttttgtttttttatcatcatgatatttacaacttagacgaactaaaaatgtgggagcttatttccacgttaatttgttagatattcgtaccaattcataaacaaaaattggaatttttacggaaaaaaggaatatcaattttttttttttgttagtattaaattctccaaaattgaatatattattggtgtatttctaaagttcagtctcaaataattaagttatacgattgtttgcttcctttttaggccatttattcttataattacactttaaaatatgttatcagtaaataacatattaaaacatttaatggttttggtttttttgcacaaattctagtaaaatgaatacaattgattgatatcatagtcatagacaacgtctatatgcagccgtttccacaattttcaatatgttttactaagacttttttaattttgtatgagaatctagagcatgatgttgacatttctaaagaaatgagaattgtgttcattgagtttattgaaagagaaatataagattgaaaatgagatagctcatatggagctttaatcaaatgaaaataacaaagaaaggaaaacgctttaccttgtcaccggtaacaaaatgatttaagattgatatttcataagaagagaaggaggagagttgcttccaaatgtgaatcttctaacttgctaacttccaaagaagagatggaattcaatgtatataagaaagagacaaaagctcgatatattgtgtctcaaattgggtatactgttttgaattccatcatagggatcaatatataattattgtatattcccatagttcttgttatattattgtggcaagaagtatgataattgctcaaatgcatataagaaagagacaatagctcgagatattggatataatatatttaaatatgattgatcataacataatataattacaatcaattacaaagccaaaacaatctcattaacaaatgaatatgaggatgtgaagtgtgtatacagataacgaaggtattccaatgagaaacatgttaacacattcttaaccaaaggtgttgatgcaatattttatgctcttgggtgggttggttgattcattttctacctgtatcacgacggcaacgttcgattgttccgcatcctctcctgtaaggatttgctacttgcttcttgcaggtgttagggtgggctttgtcacaatgtatagcatgatctccatgattcataccacgataacttatgtatcttgtggcttcaaccttggttgctgcaagggccaaaaataatatgagagcaagagatacaataaccttgatactttttgacatccccatattattattattttttccaataaatcaaataaataaatttatagaaggaaccccgattaggaattcaatttatggtatttatattatttgattgtatcggaatttggctctgtgggattatgaacaagcggtagttggtgtttatatagtagagaaaaatggatttcaaacttggttatatttggataatgattggtaaccacatagattttagtaaatgaatttttttttcagagttccataatggttatctcgacgttagttatgggttgcttattgcttgagataagggctttcgacaagtagagttagatttggatttaaaattggtggtgggttgtctaagcacagagatcagcaatgctcatcctctgttcattcttgatacgtttatatcaagaccttttcactagaaactggttagtctaaatgtcaaatgtcacatgtgtatatggaagctaaccgtttagccaacgagttagctaactatgcttttctttgcctttaaggtttcattgttttgagatgtgtcatgaggaagttcatttgtttttggttgaagacgctaacggaagattgttccctaaagcagttttgatgtaattgttcgtagtttttctttaataaaatcgggttgacaatttcacccctcagcctaccaaaaacaatcttgacgttagttattacactaactatatttgaattttgaacaaagatatttgtctatgcaaaatataaaattaaagaaaaacaaaacgaccattatcgcaaagtgtttcacacaaaagaaatgtggttgcagatacgcacagcaaagtcactaatagagaactacaacggaatctggttcaagtactcgactccgaagtattcactcatcgtatggctagttcggaaaaacagagtagctacgggtgacaagctgatcaaatggaacccgcaaactattttacactgcattctctgttaacacattttggagacaagggatcatttgttttttatgtgtccctatttactactcatgtatttttaaccttatttatttttaatttgctaaataaattatttaatggatcgtcataaccgattcataatctaattcctacaccgtctataagagataacttgatttagtatagtcgaatgtaggtgggatatgtcgcagaggtaaaccaaccacttgactacaaacacttcccataccttcacaatattagacctgaaatcttcaaaatagaatccctaccatcttaaaccgaaattctaattttgttcaatgatatagacattacatggaataagttacgttgtggcatggagaagagtatgtaacacataaaagcatatgagctgatcaatgagaaataactaaacaatgcataaaagtaaatgcttcttgaatacattttatattgaccagttcgtctataagcttacacttgtgatcataatgcccataatcaaaaattgattcatctttgcacgtttttctaaacattttcagatgggaattctgaataatcaatcaactcggtgccgattcaattggatgcacaagcgacaaacaactgattaaacagctaaaagggttattgtccaagtcatttccaatgtatatatatggtaatttatcaaagaacattgctatgtatatggattttgtttgcttagctaactgcagaatacatatagtttaatttttagattcctcttttgatagtgatgacatgagttaaacaaatttggttaaactattttgttaaaccagttttctgatggtgcaacaaaacactatcaatcagaaacaactaaacaattatgaaactcacaatgaatatttgtcattgtggccacaataccagaccactcgatcgtcccgcgaatcccttctccatcttcgtttgatcaatctcactccacaaaatcgctagctttccatcgtactccgccatcacagagacatcaaacttgacattaagtgtcttcaaaccaaccactttaacccataccttgcgctttacgtcaaaacccatcaacccctgctgaaaataacaagcatagagcacatcattaacaacacacatacaccatacgatatcacttgggattgtcaatgtctcctttcttttaccttctctcggatcatacacaccgattctcccaacttccacagtgtaaaccttccaatccagcgacaccgcacttaaccgagtcatcaatccgcgctgcgttttctcctcaggatctttcgtagttttccaactccgcgacttcggatcataaacttctacttgtatcttgtcttcacaacctcctatcacgtatatctttccattgattactcccacggatgcttcatccgtgcgagcaaccttcatgcttggtccttgtctaaacattccagttcgagtatcaagaatccagagttccgacatcggttcgaaggatccacctacgaagtagatttctgacccaaccgcggaagagttgtacatagaatgatgagaagggaacggaatcggaatcttgaccaatttatacctaaacgtcttcatagccgtcttcatcgtcttcttcttaagagtgaaccaacggtagatcgtatctggtggaacattgattatgttttggctgaaggagacgtagacagaattctttgggaggagagttcgcaaacgggagagctcaggtgaccgaacaagggaccttagggttttggagactcgacagaggtttaggtaatagcttcttgggacacgttgcaagcagtccaaaacgatttcgtcgggcaatgaagtaaacgatggcaaggacggatcgttatcttctagcggtggcttaactgatttggaggaagattgtttcttaaacttcttcgaagaaggagacatatcgttttggcttcagattttattattaggagaaccaaacatattaacataagaatactaagagtttttatttatataggattataatttagaatattgacttggatttagataaactgatacttttttttgttttgcctttttttgtccttttctcagcaatttaaaatttctttttttttccttttcacttttttaggaaaaatatcttaaatacgaaggaataaaaaatatatatatataaaattgaagcatatttaagataattaatatatttgaccaaaaaagggaaagataatgaatagtgtattttaatataataaaggtttgtttttggtctgaaattcagcataaatccccaaattgtcagaaaaaaaaaaaaaaacgtttgcgaaaccctagtcttcttctgttgaagaaataatgtttgaaaacaaaccggatgatagtcccgtgtatctcgcaacagcaagccatgatcaaaccatccgattatggcaagcccgaaccggtcgctgttacttttcctttcgctatcctgatttggtgtgtgttttctcaacactaaaatctctgtgacatatgcattttttaattttttgacatttcatctgaaacttttgtattatattcagcatgtgaataggcttgagctaacccctgaaaagggtaaactagtagcagcttgcaatcctcacatacgactctttgatctcagatcctacaaccctcatatacctgtaaatatccttctttttgatgtggtttttgtttgtttatctttccttttgattgaatatatgaatgatcttgatggagtctttgtgcacattaggtgaggaattttgtatcacacaccaaaaatgttatggcggtaggattccaatatactggacacatgatgtattcagggtcagaagatggctctgttaagatctgggacttgaggtatatagcacattcatgttttttttttctctcttctatatatagctcaatgctcattttgatttgacccgtgaaccgaaaatgcagggttcgagaatgccaaagggagtttagaagtgtttcaccagttaacacagttgttttacacccaaatcaggtacatatcttagtgttgttttgtagcaatcggcttagttgtcttacttgttatccttttttatagactgaattgatatctggagaccaaaacggtaatatacgtgtatgggatctcagagcagatttgtgtagctgtgaactggtacatttctttatcctagttacattttctaagaatctgtagatatataatattactttggtgtataactatatataggtaccagaagtcggtacacctatacggtctttaacggttatgtgggatgggacaatggtggttgctgctaacgaccgtggaacatgttatgtatggcgctccttgtgtgaaagacaagtactgttctaatcataagaaaaactttctttcttccattatgctgaaataattgttcatgtcatttaaaaatttgattgtgttttttgctagacgatgaccgagtttgagccccttcataagctacaagctcataatagccacatccttaaatgtctcctttctcctggaaacaagtaattatgtgtttcttcttctttctcttgcaacctgttttctttgtcttctttctttttgtaaggtcttatatatttgttagcagatatctagcgaccgcatcatctgataaaacagtcaaaatatggaaccttgatggtttcaaacttgagaaagttttaacaggtatatggtctctccgtgtttctgaaaggggtatgtgttctcttttacactctcatcaatatcatttaacaggtcatgaaagatgggtatgggactgtgacttctcaatggatggagaatatcttgtaacaggtactacttaatctctttacactggaaaacttgtgtgagacaaaagagtatttaaactggttttcactttgtactattagcatcatcggacaccacggctagattgtggtcgatgcgagcgggaaaagaagagatggtgtaccaagctcatcgcaaagctactgtgtgttgtacactactgcgtgattaaatcctgtaaaattatcaaaaaggataaattatgattgtgttgtttgtgttttagacaaatcttgtacatttcgattggatttttcttcctaattactcctctgatattttcttgatcagacgttaattctctccccaaacccctaatcatggccgagggactcgtattaaaagctaaactccacttgttgtgggcaagtcttggagtaagtatatatcaataattcaatatcattgagccaacctactcacacggatattcccgtgacatgtggtgtaaaactagcttgccaaatctattctaatcctactctaagtcgacaagtcatgaaccacgtaaagttggatacgaatttagatgacatatactgaaatgcccaaaatcgcatagaaacttgtatatctagatttcagatacaacagtcgatcatctagagtagacaattctattgttgaattgtcatacatcaactttttagctaagtaagacgctatattaataaaattgtcatacaaaaagtaagaaaacgtttcacaacatcattactatcataagcatctcttttatagttttgatcagaaatgctactacaagaaaaactgtttaaacatctagacaacgccaaatgtcatggtaaataggattatatattttataaccttcagttactttttgtaagtttaaaagcttgttttgtttttcaaatacacgtttttggtatataggtacctatttatcgtaagtgctatattaaaaatgaaaagcaaccaaagatgcaaatcatgtttaatctgtgatgctcacaattctgctcagccaatgcaacatattagtaatatggtaattcacaaagtaagaaaacgtcatcacaccattaccatcataaactaagttttaataagaaacacctagacaacgccaaatttcatagtcatgaggaacaaatccaacgagatcagaccactcgaccgttccatggatttctactccactcctctccaacacgatcatctcacaccaaatcctcttctcggttcttccactaataatttctctcgtgttatttccccacagaaacccaagtttcccattgcaatccaccatcccaaccatgtcaattgatttataatcaagcttattcaaacctttaacctctctccataccttatctttagggtcataccacattaccccaagattaatgtaataaacatagatcacactgtttaccacacacactccacctctcctccatgcctttccatctgccatcaaaaaagtctcacattttccatctttcgtatcgtagattatgtgactcccatctttataactcatacaataaaccttcccttccaatgctacagcttcagtcacaattgctccatatcgcattaacccttttccgtatcggacttccccatctgaacttaaaggtccaacttcccaagtttgtgaattcgggtcgaaaacctccacttggatttggtcttcgcggcaccctcccattacgtatagtttcccatttactactgccacgcccggtaacatgcgagcctccttcatgctaggacccacacacaactcgccggaccaggaatcaaagatcaataggcccggcaaacatttgtacatgcatcctccaacgaagtagatctttgaacctatggagacggagggacaatacaacatatagtaagaaaaaacctgaaatgagttaagaacacttgttttcttctcgtttggattcaaagtaaaccaatcaagtctcctgcccaaaaaaggcttagtatcggaaaagcaaacataaacgacgggatcatctttgcctattaaggatcgcatatgtgcaagctcaggagaacgcacaagggattggaagcttttggaaacacaagagaggtttgggtagtagcgtctggagacacgagctaagcagttcaaaactacatcataaggtaatgacgaaaacaacaaagaagattggtccgcggcaatatcgtatggtctagggtttcggttgattaagtttatagctcgtctcatgagttgactttggagtaaacctgttatgagtccttttactaatgagaataacgatgacgacgaaactctatgaatattctcgtgccgtggctcgttggtggtggaggctgctggagaagacatatcgtacgatggaggaggagaaaagaaaaagatgaaggagccctacttaataagtatgttggatttgaaagctaatgaaagtctccgttgaggagatcattctctattgatttcaatataaaggcattacagttccccatatctagtgatatctacgatcgtcctatatacaaggagaatatactttaagaatcataaacaaacttatatcgaatatgctatcttctaataggattatatctgaaaagaatataaacaaattaacctatatataagcacaacataataccaaatcccctaggcctagaacctattagttatttaaaaaatgaaaaataaaaagtcatcaattttgactaaaacgaaaattgaactatgatatcaagacctcatgcataaaataatatcaatattgacattatcaacaaaaatgtgggacaaaatatcaaatatgaaatatcgatcgacaccaaaagatgatatttgggtgaaacttcccttatctaaacttaaaaatcttcccttatacatcaaccagactctgaaactcaaaagcattaaatgccatgaccagtttacttaccttaaggaaagttgtctcagatcactcatggcggcttgttccttgtgttgtctatacgttttagatcatagacaagagatgcattgaggcctaatgatgatgatggttgtaatacattttgagtcatgattcacaatttgacatcatcaagacacaagttaatgaatgttgtgtgttcgattcttgaactcttgatttatccactagctaatgctgcggttctgcctaatcgattggagaatttgtatttgtttatcacatttgtttgataacatattggttcattgtctcactcggtggttagcaaacacttgaaagtggattatgttccaagcttttatgtatctccagtctcagttggatgttttgttaataaataaaatatggctcttgcacaatgggcatgaaacaatctagtactttacttggacttcaactgtcgttacttatgctttgctttcccatagaaaaatacagcatatatatatagtagaagccaaaacagagcataaagatcaccatttaaacaaagcatattaatgataatatgatgattaaacatataaagtatcaaacatcataacatcatcattagcatcaacgtatctcttt

SEQ ID NO: 264 - DNA, 81236 bp, Arabidopsis thaliana
aaaggagggacgtaacagattttatctgttagcctgtaaggcttccgatcggcaagcatggtcaattccacttctttatcgaaattgttatcaatttcttttatttgtgtcaatggttgtatatgagtggtttatatatcttgtaaaactttttatgatataatagatttgattgctgaaaaaaaaaaaaaaaaagtcgaataatataattatttctttattttcgtaatatttattgccaaacattatttattttctatagtcgacttattaatttagagatttggaaaatctacatagataatttcaattatactccaatatacaacaaacaacatacaataatatacaataatacgtaatttacacacgctaaatgtataagatccaaattatatatgcctctcgaatagattatatatatagataatgtttattaaaatattttttttttaattttttagtaaaaataacgttccacgatataccatggatcaatctttaactctaattaaaattggaataggtttcgttcacaatcaataacttgtataattccattacttccaacgtgtgttgccatacattttacgatgaccattgggtaaagatcatctggctgtccgacaatctcaattctccaaccataaccaaaggcttcgaaagaattatatcaagactcgattccataagctcgacatgtgtttgttagtgcagggttaaacactctccaacatctctgacctaaacagagaaggattcaaataaaaaaaactaaacagttcggaaagaccggagaatcccgacgaagcatgttaatgggctggtgagcaaaaccccaataacaggtcgcctttggcctgtttcccgtttgggaggtcgcttaaccgacttctaaactcgtaagaaagtaaaactacctattctgagaagcgaacaaaaatcaaagattcaaactcgaagagtaaggaagttgagtttatcgctgaaccgtcttttagtagtataattaaatagagggaatttgtcctctattcaaaggatatgcaacttaatacaaaaaaaacttaatattatttattgttctttagcaaaccctaacttgttttcaaagcaatctctaatctcgttgaatcaagttttagaccaaatcaacagcaagagaattgattagatttcttttcccttttttaaacaaatatattgtgtgaattcttggttcaacagtgtctcacaatctgctagtttaatttccacttaaagcattgcaaaagcctcacaaatatcatggtggttatcaccatgcctaaggccagagaagcacatcctctctttccagtaccaaacaagatcaatattcttcaccatctccttcgttcatatgaatttgtttttttaagtttctttatttaaaacactcttatacgtatacaatatataataattaagtttgcattaattagagttggtaattaatggtcatgttcatgtaaacgttttagctgttaaaccttatttaacagcatctttttaattctttaatttcttcttctttacaatgtagcatcgataaaatcaacaaaacacggactatgtagctaacaagatttctgtacctaaaatttcctaactaactgtacattcgttcgattgtagggacatttttgtccgaaaaggctattctgtaagaactgaatctaattttgctaaaaccaggttaagaaaacatggtaaagtggcttatggcctgaaagtcgtcattttctattcgagttcaatcatatagggccgtggtaatatgtagtattttgtcgcgacccaatcattgacgagaaaaaaaaaaagacaattgtcaagagatactcgatgtgaataccttcttattaatcatcaaaacaaaaccaaaattaatacatacatatagaaaaaagcaagagaaaacacagatcaagtgtttccaaaaggaccaaaaccgaacaaagtttggtttgtgattcactaaactttgggttatccatagtatatacggaattatcctcgccgtacgtcaccgtcgcctcacttcaccattgggtaaaggtcctccgacaatctcaattctccgaccaacaccaaaggcttcgaaagaaacatatcatgactcgattccataagctcgacacgtgtctcacttcctgctagtttccacttaaacccttgcaaaagcctcgctagcatcatggtcgttatcgccgtacctaacgccggagcagcacatcctctctttccggtactaaacgagataaaacggagatcattctccgtcaaagtcacttccgaacactcattgagatgcctttctggtttgaagctaagtggatcagaccaaaccttggggttacgaccaagaccgtaacggctaagtaaaacttgacttcctttaggaatatggtaacctgcgacggtcgtatcagagagtgccacgtgtgggaggttgaaggcggcgacgggatgaagacggaaagcttctcggataatagctttaacatagttaagttttggtatatcggattcttggacgaatctttcttttccgacgactctatcgatctcttccatagctttgtggaggatctccggtttgtttatcatctccgcaatggcccattccacggcgtttgatgggttgtctggcgccgccattacaagttcctataaaattaatatgtaaaatattttcattagtttaagcaagttgacaattaataaatgattcttatcttataaccaaaaagataaagattcttatcggtttactgttctatgcatggactcgtggtcaacatgctttatgctacacataagattttgttggatatagattgtttggtgtttaaccttttctcccaaaattgctaagacaattgtttttgttcttttaatttgtggacagcaaaatagagtcacaatcagtttttttttttcttttattttatagatgttgtgtctccactatttccttcctaataagtttctgccattttaactccaaaaaagccaaaccctttttccatgagtggactcatgactcacgagtcaacatggatatttgacgttatgtttcgctttcaccatatttaactttcttatattaaacaaaaaatacgtctgaatctgacggatattggtggattgccttgttttttttagcaaagatactttgtaatagatgttatggcattttctctgccaaaagtgaaatattactctttcaacgcatatttttctaaagaatattagaaatctccactatttcaactcaaagaatgtcaaactatttactcgtcgatactatatataaatactatgtcatatattattatatatcgaacgtaacagttggtttaattttttaaatatgtataaatgtaacatatgaaaagtatattaaaaagctatgtaccttaatggttggtttgatttcatcagcggtaagcaaaggctggccagcttcgtccttgatagagatgaaaatgtctagaaaatcttcgatctgagttctcttaccttctctccacatcttaatcctctcatcaattataggatcgtgatatttatccataattgcactggattctctcataatcttttcatgtccgtttagatccaatcccgtaagcatcggtagataatccgatatacaaaacgcaaacgtaaaccctaacccctcgaacatagcatccatatgctcgatatcttccaaagtcggtccaccatcggcttcggttttctccgagaacgtcctcgtcccgaacataagcctcttgattgcatttccacaataatgcctcgtaacaaaacggagatcgactggttcagagttcttaaccatgttgtagagccaagcggtcaagtgatcggtttcctcagctctattgtcgtgtagccaacggtgtctcgctggacaaacaatctctgtcatgatcactttcctcatcttcttgaattgttcgccaaacggtgtgatcacgcaggttttgtagccgttagagagaatcttttgagcataagtgagtggtcttgacgcaaagagtgcgtcttgttgcttgaagatctcacgtgcaatcttaggacatgtcacagggatcacgtgagtgtttcctagacgcacacaagctatctccgtgttaagctccttcatgaggctgtggagccaccggaaaactggacggtttttaagcatcgccggaatcattccaacaattggaaaaccggtgggtcctggcgggagaggatgcaacttcttgtttcgtgaagatgactttattttgttgagaatcatcaagaagcaaagggccgcaagggcttgaagcgttgtgaggagatacatgttggtaaacgacgacattccgagacttgacttggtcgtgagatccgaagagtttgaagctaaagtatccatttgcaaggaagaaggagaaggagaaacaattagtatgtgttttgtaatatatgctaattgtttctgcatggatccttctttcacgttgttatttataatgtcacattaattacaggtaggtacgtgtgaaatgacgatagtaccccttttgtggtgggggaggaagcagtgtggaaggtatagctagagttggaccaacttggtctctagtgaggagtgtcaccatattttgaattttgtagggctaactttcaaaaaatgtacataaaagataataatcatgtataataattcattcataatatattttaaaattattttgttggtgacctgccaaaaatcctcgtgttatatatgtactctaaactaacaagacagtttttttttttctcggtaatatgaattggtagtctctttatcttagcactactctcatatctaacagagccataatagtagctttaactgattgaacttacattatatctcttttgagtatatcttattttggtaggtcgtttgatttatcttcataaatgattcgtctctacaatatgtcatattcaataatcaatacgaacatgatgttgctttttttgggggataataataaatgtcccttcagctttttgtagttatagccaagtctttcctatatatcgataatttatccgtggtgtgaactcttaaaatgaacaaatatatgaaaatattttatgtaaatctcatatcgttatacaatgtgtaaatttgaaattatatgatattaggggtgtcagatacttttaaaaatatgtcgattttgttttggtaaaatatgtgtcgaattcttatagtcgagtaagtgtttaaaaaatctgtttcgatatattaatttgaaaccataagtacataattgttttacttaatcatcaaaataaacagaattacattgatgtacaaaacaatagaatgagataagcaaaagtataagatgttttatcatcaaaaatctttttgatatttagtctacttatttgaaaagggtgaaaatatatattaaacaaatttggttacaaatgaaaatattggtacacttcacctgccaaaatgcctcgtggaattgatgttttggtcgttggagaaggaaggagtttactactaaccatatgaatgtcaaatatagtggtgggccctacacatatcgattatccaaaaatcatgagcttcacgtgacggatataccagatatggaacgagtttcacatctccatccatagaattctcaaaagtggtatgtaaattctcaacatattctttaaacaggattgtttagaagttagaaccccatgtaaaaactctttgatggaggcagctgcttatctagaaaaacatttagtttaaggcactattaatttacttattatatattattgttttatcaaaattattacatatactattcgttactaaactataaatttgtgatagaatatgtagttcaacaaatctgtaatttatttctcacaatttatataggtatccaaggaaaaactatgaaattgtgtacatataattttgttattcatttttacataaaagtaaacgtatatatatatatcaaacattttagaaatatatcagcagacatactatttaatcaattaataaagaaaatttaaaagaaagttaaaagtgaatgttcataaatgaaaagaagaaatacaagtgatttaattgataaaagtggggaagaaaaaaaaaagttaaaaaaagaaaaaagttacttcaactagtttcggacctgtgtaaagaaagacgaatattgaaaacacttaaccatttgtgctgaatcatttaaactccatatatttacaagctaatatttataatttagtgtagggcacgtgtcccatcttccatacacctagatccgctcctggatggaggttcatatttggataaaatcacaggagtattgaagtgaatcaaacatgtacattttaattcttcgtcagaggaaaacgcatcaaatgatataatatattaataatatggtttttatataactagggatttcaatataaagttcagtagttttttgagagaagaaatttttatccaagataagttagatcatcctcaatggttaagaaccaattagttcttaatcttgtatcttaacaattatttaaactaaaattttgaaacatgacatgtggctgcttttttcattaataaaaatatcttaactaagaaacaaatcttagttttctatttattttgatttatttttcagaatttaattctaagatattagcctaagatacatctaagatacaccaatggaggtgctcttatattttttagatgtatggtttaaatagtatttctgaattcatggcagaaaaaaatactactattttgtaacgttatataattttacaatttaagacttttgttaagtttcataagctccaacctcaaactaatactaatggacaatatattatatagtttttatttttatttttatttttatttttatgttgtttctattaatttcctatgtaggatactaggatcccaataaatattatcgagatgatgatacttatcggtccgtttggagaatagcaataaatatatcctacttgataagttgttctctgatagtaagttaattaagttttataaatttcaaactcaaaaatcagttgacaattagtgaattaactcatgttcttatatattattactttaaatcttctaaacttctatgtggaagagattcaaactttagttcctaactccaaataaatcactcataaacaccactaaacaacaatcgttgatcaaaccgtagcaactataaaaacctaactgcatgcatgcattaatgcttgtctatacatattgatagataaatacccaatatcgagtatacatcctggtccatacagatacacatgtgcatgattatcgtacgttaatatacctaaatattttgtggatgcgcatgtttaactatgaaaagcaagacgaagattgcgttgcaattatgaatgttatgaattggcttagacggtctagccagctaatctagtttgtaattttatttttttaacctatcaggtgatccgattagttttagtaagaacgcaccgaaatagtacagagtggacttgatgtgatcatggaaagcacaaaggacttggaatttgatcaagagcttgtagccgaagaagaacttgaagcagaggagcaacttaaacctgaggagcattttgaagcagaaaatgaacttataccggagaaagagtatgggaaagatgttatcttaacctcattggttttgatacatgatcatcaaatgggcatgtgtctcatttgtactctttttcccttgtcaagttttgtcccaatgggttttctttttaatgaggcaaatgattcacattcaaatcacccatttgatgatccaaactatggtataacattcagaagttggcccaatggaatatatatgaagtccagccaattttatgaccatcacaaacccaagaaaagcccaaaccaagtgggtaatttgctggtcaagaggagtgacgaaaatagcatttcaagagtcattttggagccaagaagtggaagggttatttttaaactttcaaactagtctttatttctttttattttccaaggtagtcttgtgagtttgttccaagacttccttcttctttataaacctcttgtaatctcttatgagaattcatctatctttttatcaaaaactctctcttaaaaatagatcatgggtccattttcgtatgccgaattttgatctttctcgacttatcaaaaggcttttccgcatccttttgtggcgtcattcaatccatcatctcgtctttgagtcgtgtgtcgtctctatttcgagaatatccactccagatcttccaagtgccgaaattgggattcattcctcactaggatcttatcagaacttctctcgatccatgtaaaattgggccaccacactgtctaatccgaaattgaaatgtcttccaactaatatcagggaataatcaaaccacctataatttaatttgtaattttggtagttaatcattttaaatataaaacaaatcgttttttctcctatatcttttcattttctttagcttctctgtttcttattttcatcagatttttttgctcccagtattacggttgatcaaaaagaaaaaaaatatatgcagcttgatcattcgtagacggggactaatttgcgcttcggcctgagattctctgactaacaaaaagaaaaacaaatctgatcagcttaattaactgattatacaaaaactgatcctatataggccgattcattaaggtacaatttaaatcttacattttattccaatagttgacaattttgttgtgtgttccaatatactttacaaacttttgatctgccatattattatattcgtttgaccttccgagctaatttatagattattgtattcaaatcataatatcgtaacacgatatctttcatctacaacaaacattgtgctaaccggcgcagcaaaacgagatttaaaaccaaacagtccaacttacggaaattaaataatatatggtcgcttattctaggtctttttacctaccaagtaccaacctacacaggttgaaagatatggcacgtgattagtaaataattttctctactgtagaaaattcaaaatgagctaattgtttcttgataagaagatttatcccaaaacctctttttagaaaacagaaaagttattacataaaaagatgtaatagatactgaagtatgccacatgctagccttgctggtagttatggactaaaggcaaacaattttgagagttttgttacctcacactgcgacaaaggagttataaaattgataattaaggattccgaacagagcatgtagtctaatagtggtttaaaatattaatgttgttgtgcatgtaaacatttttactcttagtacttagaacaccaatcaaattaaatcagtaaacacaatttgtaacgacaaacgaacaagtgaagcatatatagagtgattgattaccttcacagagtttcgaagacatacatgcttcttttatggaaatatgtctcgagagacgagaagcacatgtgcacattaacattgaaaaattgtcaagcttctgtcgaaattgcaatcgtttagtttgaagagatggattcgcaggattctaacatttgatacgatatgatttcagctaagcaattattagttttccgagcatatatagcagtttgcaaaactgagggcatattcttgttgtacaattttgcacacatccaacacaataagattacattagacaagtgaagaatagagcccatacgaactggcgaggaagccctgatcaccaatctcgagtcatagcacttcaaaaaccgttgcatcggtagaaagcagttgaatcttttaaatgtcgaaattatgagtgatcattatttttagttatcaaaaagtaattcagctaatcagcttacatacgttaaatcttacaaatgacattttcaacatatttttatctcttttttgtttattttagtccaattttgtgctaatcaacgaaaaactttgattccagtttgttctttcaccatttatactcaccagtcaccataaccagatctcaacatccacaacgacataaagaaagaaaaaagcagaaagatagcataaatcattcacacacaagtatcaaggtttgataaaaaaaaaagtgcatatagattgcattctttgaatatatgggtttatatggacggcaaacatgtaaggtaacaacaatagtagatacaattgtctttatatacacgtacgtgtaagaatgaagtaaacgtgctccaactaccaaagcccacctatcacatttcactggatatttctttaccaaaagaagaaaaaaacaattcactatttttgtttcctaccaaacctgaaattattatgatttcgagatgggctgtctgttacattgttgagatgatttcgagactaccaaagccattactgggcaggctctaaggactattatccatatccttaatcttcttgggaatgtcagtaccaagaagattctggcctgaagcagtacaatatgctgtccacattttgaatagaagccatctgctgcacttggattgtttttgacgataaaagagatagattggaaatattgttaatggttgaaagttgatgacaaaatctctatatgaatttaggtctaagagagagttgaaattgaaatgtctgttctatttttttcctttcctttctcctttgttcatccgatttggttttgattagattggcatgtatcattcttgatagactctcattgtcaatggaaaagtaatctaatacaaaaagattggagggatgagccaaaaatcaataacaacatgttgcgatctattatgtgtttcaatgagaaaaatacttagattccatgagagttatatcaatctcactagtagaaaagacaagctatataaaataaaaacaaggaaggattcatgcatagatagaatcagcatataacaagttaaggccggcaccactactatgctagaggacagcaccggaccactcaatgttcgctgaaacctcccccatccctcgggtctatggcgtctggtcagagaaagctcggcataccaaagctccaaaatgtgatcaggccgccgggcttcccagaagatggtcaacctctgagcagagaaggcgcaaagtttaatgatattaaaagaagcacgtcaccaccagagttagagtgtcgctgctgcaaatcttccaaacccttgacttccttccaatcagtttcctctggaaaacgccacagtattttcccggacataccacatcagaatataataatgcctcaaataaaacccaatcgtttctattttctgggttagacttgatccggttgtcataaagcaacaacgccttgttgagaagaaaaagatttgactattctcatccagcgcgtgaacataatcaaaccaacagaaaaaaaaatccaaaaatccaaaatacccgaatcgaaaatatccaaaatacttgaaacccccttgaaaccatccgaaaatatccaaactttttggttagaactaggcatgggcaaattaatcaaacccaatgtaccaaactgtagcgaacaaaaaaattgaagtataagattaataattatcgagatctatgttagctaaatttgaatccaatcaataacctaatatttcaatgtggcacacgagatttgaaatgtaaaatggtaccagttcataagcgtaagatattacgtatggatgcaaacgtcatggtgtgttcataatagaaacccttcgtaacaactaacaacgtcaagttgttttttttttttttattggtcaaaccgtaacaacatcaagattctcgtgaactttaaagatacaaaatgtttttttgtttttatcctttcatttgaaagatggaacgtgaaaacaagactttccccttttgcgctcttacataaacgataaacatgaatgcatataacaaacattaacatatgtatgtgatcattcagaacatagtcaccaaatacttgtaattaggatagtttaatgatctccccatactaatttaagatacatatctttcttagaattttttttttattaaaaacgaatacattttttgtgtgttttatgtaatttatgataagtaaaacctaatttggccctcatcttaaatagaacccaattttaagagtcaacatatttttgtaaaattatataacagagtatataatatggttgataattcgagtttgctttgatcttttttttttcttaagttattgaaagagatgtcagattccaattcgatatttcttttgttctttggtactaattttgatctttctgatagaacaaataatgctagatctatataatttatcaaaactgaatacaagtacttacaatacatttttctgcgatgagaaaataaaatacttgcattgtgttaattaattcgctctttttatgaaaacaaaacctcttattcttaaactggttgacccaaaaaaaaaagacttcttaaaacgattacaaaagaaaatcaagaacatgggtaaacaaaaagttctcaagaagaagtgttaagaacttaagctgtttgaggtgaacaatcatatgtgacatagattgctcaataaatttcccaaccgaagctctaatgtcacgagtgacagattgtttaaccgctaagccatctaaaactctatcatcatcatcattgtcttgatgatcttcttcttgttcttcttctttaaaatcatcagcaagcaaatggagcggaactacggattcttgaagctcccactcctcaatactaagtccccattcttgataatccactcccgccatcgctaaagcctccatcgaacccataaaattagaaagtgatcttaaaatgtagtttgctttgttaatattttcttggaaccttttgagttctacttcttctctgatgagtaggtacgtgtggctaatgaccttactatatataggcatgtacggacgtgcggttcgctggcttctcctctgaattcattaccaaaagatatcacgtgaaatgttcaaaaatcaaaccgtctggattgaattttaattgtcaaatactttggttgacaaaaaatacattgaacgaaaaacaatatgaacaacaacattctcgtgacgctctctcaaagttgaagagaagaccatttgcagattgaaagtagtagtaatattaatcttctttagcccttactcatcttagtgatctattaaactattcaaattaattacagcgtaactaaacatagtaacatacacacaaattgatctcactcacgcgaatacaagaataaaataaaaatggtatttagccatacatgttcttgattttcttttgtgatcgttttaagaaaaatgtcaaagaataataccgcagaatagcgacatccaaagaataattgacatttcgctctctcttaaaatccctatcacagaattagatagttttaatggtctttgttttttggtcatcttgttttatttagctgtggttatgaaaagtttattattattccataacattacaatccaaaacacttgaagattggtgaaaaaaaaaaaacttgaagacaaaaatatggtttaaaaaaaggtaaaactaagtagataaattaaggttagtcaagtcaatcttaagacttggcattctccaacacatatttttcttgtaatatatatatatatatatatatatgcataattattaacttagagctagatgaaattatatatttcttgaagcattgacatgaaagaaaattgacttttatctaacttccaaatttcaattcattttataaacttcatacaagccaaacttatttaatttcaaaaataaaatgagtttaattcatagttttgatgtaaaaaaatcgctaaatacagaaaaatagaggataatttatttaattatcatattaatctttccttttaaaatagtcaaacacaagttccattaatttattattattcgcgaggaacagaaatttcagtatcgatcttcttcttcttcttcttcgccaatttcaacactttcgaaatctgagaatcttctgtgtgaatcggaacgaaattaacggtgttacggaggctagggctgatgggcgcggcggggtccaaactcgagaaagctctcggcgaccagttcccggaaggagaacgatacttcggtttcgaaaatttcggcaacacttgttactgtaacagtgttttgcaggtcgagtcctcatttcagtttccatgtcgttttgcttttggaattagatttattgacaaaaggtttcatttttaagtaaatgtagagtgtgtatcagttcttaaaaggttttatagatgtggtagcttatggcaggactgggttgttgatcttaggtctgttttgcattctatgtttgtgcacaagtctccaggagttgaacaagtttcatccatagactaatttgtttgatgaacctttctcttttgcaggctctttatttttgtgctccctttcgtgaacaattgcttgaacattatgcaaataataaagctgatgctgaggagaatctcttgacctgcttggctgacttattttcgcaggttatttttgtacttcaaagacttatgtttaggttttagtctgtgtatcttttgatggatggatatgttctactacgacagcaaaacaagttttgactggtgaaacatttaattgacaagtctatatggcttggttattcttacacatgctggttttgttttacttagccactgttgaaactatggctttgcagatttgtgaacatgtttgcttaatgttcatcaataatcgctaatgtcttcactttttcaaagaagctaattttattgctccttttcccatagataagttcccagaagaagaaaacaggagttatcgctccgaagcgctttgtgcaaaggttgaagaaacagaatgagcttttccggagttatatgcatcaggtattctgtgtattcttcttatatgaggatagtcaaattgtaagaaaagtatatatgtctgtagagtaaattgtgttactatctcatgcaggatgcacatgagttcctgaattatttgctaaatgaacttgttgagatcttagagaaagagacacaagccacaaaagcagacaatgaaacttcatcatctcctgaaaagattgcaaatgtactgaaagctcccctggcaaatggtgttcataaagagccaattgttacttgggtgcacaagatttttcaggttaggtgcttttattaaatagctcatcttttttctaagacacgatcactgcattttgggcctcatttagataccagattagttatgtggaaaatgtatttggtcatcgacttatagctgcatttagtatagatgcgcagtaagcatcaataacatttcaggataagcttaaattccttccttgtccccaaaccaaacccaatcacaagagcaaacagcacatattataaagtttttccagttatttcaagtgacttagcatgtgtaaactcattacagggtatacttaccaacgagacaaggtgtctacggtgtgagacagtaacagcaagagatgaaactttcctagacctgagccttgatattgaacagaacagttcgataactagctgtttgaaaaacttcagctccacagagactctacatgcagaagacaagtttttctgtgacaaatgctgcaggtatgaaactgctatttcttaatccgcacccttcgcttttcattctttaattcctaactttccttgatccttaatgctattttgtgcagtttacaagaagcgcagaagagaatgaagattaagaaaccgccacacatcttagttatacatctgaaacggttcaaatacatggaacagttgggccgctacaagaagctatcgtacagagtcgtcttccctctggaactgaaactcagcaacacagtggatgaatatgtggacattgagtactctctctttgcagtcgtggttcatgtcggaagtggacctaaccacggtcattatgttagcctcgtgaaatcccataaccactggctcttctttgatgatgagagtgtcgaaataattgaagaatctgctgttcaaacattcttcggttcatcgcaagagtactcaagtaatactgatcatggctacatcttgttatacgagagcctcggaacaagatagagaaaaaagcttttagtcatttgacaagaacataacctctcctctcttactctctcttcgaagaacataaccatgtacagttttaatgacaagattactatttggttacataagtttgatttatgtttcaaatatatatcatttaaattagagtcatgaatgcagttacagtatatgagaagagtgattacacaagaatttacaagtttaatgagtcaataatactgtgacacaatatcacaacaaagcttgagagtgatttaactggtccacaaagatgaggacataggcaacatcaatgtgtcatcatcttccaacaatgcttcaatatctatcagatcatcatcatcatcaaaacaagttgcttctgaattttcaagagctttttcaacctataaaccaagaatcaagattgtttagttttattgattctaaggagattaaggttagtgtattagtataattaccttgctttcttggatgtcgttgacaacatttagcaatctacggtattgatctctagcttcaggatattgaaccatggatttcactcttgcaagagctttttgtagcctatcctctgtttgctttcttccttgtttgaaaaaatcatcatcttcttctttctctgttccgtcttgcatcttctcaacaagtgcttctgacttaaacccgcgcaaaccagctcctttccgtctccaacgtaatatcaccttctctaatacccccactgaccaaattatctttctgtagtttttcctaaactgataacctctcacatgagcctgcaccattgccagttaaaaaccgttatgaatatgacatacattaaacgaatcaagacctttagtttggttttatcaaaacatttatgcacctgtattttgatgattctttgtctggtaatcaaatagtcttttcttcccttgtaacctcggaacttgttctgaatccgaatagcagcggcttgcacggaatcatcactatgtgcccttcctgatttgtgtgttttaggagcaagcatcgaaagagcacgctcctccgacattccaagctttttatctccaaattcttttagttgcttcttctggaaagactgagccctgaaaacctgatgaatccgagctgctgcctgagtagcgttacgtacagctgtcaacgagtctgtcaatgatgagctggatgggctaggagccatctcaacagtttcggcatttttatcatttagactgagcaaagaaacatgagctcttaaggcatattctgagagataaccagcaattcctttgtgaccattagcataggctagatcagaaggtgtgcttcctgatgggaaatctggatttgggtcagttaaagttccaggagcagcaccaagagctatgagtgaaccaattatcctctccctgaatatgaaaatacctttgtttcaaatacaaaaatcaaagaaaaagaagatgaactactgaacattttctagaagttactcacctgccaaagaaagctgcccaatgaagtgcggtccaaccatttacatcgcgaaaatcaacgcttacaccagcgattattgttggttctaaggcccagttgtaaccaagagaagctgcaaaatgtaatacaccttggccaccttcatccaaaacacttggaccttttccaccttctgctatcttttgtaaaagccatgagtgtaagctttctttcagaaattcctgcaaaaggttgtttttcatattttcttgggagatttcattcatgagcatctgatccaactggtcatcgttctcgaaaagtagtaaactaatcttctcgctcaattgtgacaaatcactgtcattcccagaaacagggcttgtattttcagatttcgagcacaacagtttaacaaatcttgcctcaagaatgtcaatagtagactcatcatctgcttctctatcaaaaacttgagactcggcaaccttatactcgaattcacgcacttcactgcatgccaatctgttggaacatgttacataaaagggaactcttccagcctcatgcataggagcaacacattggagaataccattagatataacatctgctggaacttctgtttgcccaaacatgcaagaccactcgccaatttcagtctcctcccgagtctttaagaattttccagtgacaaaaacctaaaaatttgcaaaaacaaataagcacaaacctatcttatgactccccgagaagataaattgatcaacagtgcttaccaccacttcacaacccacataagcccagcttggagagaagtcattgatgctaaagagctgttcctttgagagggaaggactcataacatatccatccatgtccctcctagagttgtgaccattggacccatcctcactctcaacttcttcccagtaggttcttgaacttgattgagtaaaggactcgtttgcatcagctataacaccaacatctccaagttctttgctcatccagcgattgaaactgtccatctttttcagaccttcttcgcccaatgcaccgtgtaacagatgttgtttcatcgtagatagatatggagctttttcattcgaagctagattgcttatagcatttagctccatatctgcagttgatacaaaaaaaaaaattgacggttagcttttaaagacaaataaattccaaacttttatcaaaataagctgagtgcagtgttaaccttgtccttggaaccacacggtacgatcagatgtaagtcctgaatttaactcctgattctgcagaagtttgaaacgaaagagtattcagatactcaaagaatacatagaaaacactaagcagcacagctgaggaagaggaatgcagaaattgagccagataccatcagaattgtgtatacctggcttttgaccatggactcttgtagactagcaaaatcttgcattgtaaaagagctttcgagtatttggtccagcacttcatgctcactgttaggctgcaaaggtaaggcttcaactccagaaccacaatttcccagaatctcttcccaggtttgggaatcaatggattttctgttttttaacccatttgttactccaggactgttgatagttttgcttttgtctaccataattgaagaatcagttacggggattgtgcgaagctctttttgataactatccctggctgttaaaaaggtaagaaatcatatgccggttggaggtatcagatggatatttggaacttattcttttactggatagggaaaaaaggaacgtaaaaccaggtaaccatgaacttacgcgtcaaagagatttgatagtaaggatcaaaaccagtaaggtttcctcctgttgcaggctgctgaagttcttgatgagagtaagctgtggaacttccatgctgattgtatgctgcagaatgaatgtatgtaatatgtataagataagagaccaattaagtaaggaatcctcaataggtagttgtgaaagaagaagcacctgattcagcatcttcaagttctggagagtgaaaaccattgacacttgctgagtcagtagtttgtgaatgattgctatgatcattttgattgaagctgcaagaagcataaccatcatgttcactggtcaaggcgtccccagtttcttgaggagaccgagccgcgtcttcagtcctttgcatccggttaaaagaagtagaaactctactaccctgattcatttacaaatttcactctcagaatgtcaacttccttgaaaagaaaactagtgaggcagagaaattagcaaataataggatgggtctaaccttaacttcgaggtagtgaacaaaaactatgtgggaaagttctctgcattagtcaccaacagaaaaaaagaacaagagaattagtaaaggtgttgtgcttgttagcttcgaagacatattagctattttgtattatacttcatgttgaatctatcataatagtttaagatcacaaacaaatgatgtaaaagttataagctataataaacttactcctgaagcaaccagtaactgcgtctttgaaagttttcattgtcctgtccatgcgcatagtaacaatgtagaacatcaacgcttcccgcctgcatagagattcacgagcaagagaaatcactaataggcacaaagaatcacaaggtgctcctctattgaccatacttctcacagaactacttagtaaacgaaacatattttatatactaccttcaacctctcatgagcttccttcacagtctttccatcttttttcttcctccaattgtgaccgtctttcctgaagtatctgagcacctttcgatcaaacataaaaacagacccacctgaaaagaggaagagatttaccatgaacatcagtcttagaacttttaagttccattctacactgaatgtttatgaaaaactttagctgtacttgatggtgtagtaggtggctcagtagaaatttgaaatctttggtaattctgtaaaatttcacagatttcaggaggacgaagccatcgatgtcgtgcttctgagagtatttgtccaacatctgtggacaacaattattgcaatcagaagacacacaaaaattagtacaactaagaagatatcattcatcaagaaagcttttaagagacactatagtaccttctgatgtagtagctaaaaagtcaacttcctcacaagaagcagctaattaaagtataaccaacacacgatactaaatttcccaagatattcttagctgcctataacaatcataaattatgcatagaaacttaaagagtaaagaagtaaaaagtaacccactaaaaatgatgaacatgatttagaatagattcgttatcaacttggataagtaaactaataagtaagtgatgaatattcagataaaatatactttcaacaagaacaaatcatcactcacaccaataatggataaaaatgcccttttgaatagattccaatagataaagattgaaactttgatgactatataccaatactcacaccaaatagatcggataaagatttgatttgacccacgcaaacaaaaatatctcaaatactacagaaagaagaaaactttcacttcacctaattcatgaactgggctgaatcgtcttgcttccgccatagatattgctttctccgatctcagagcttcaaagcagacataaaaagtgaaacttttagagtaaaggtgaaaactttcttcttcttcttcttcttctacttcgtctacttggtgaaacagaggaatcaaaaagctggaaaacgaaaatcgaaaagggtgattaaagtgaagaaggaagcatctgagtagtgagagataggaatccgtacgatgagagaaaaaaatggccgtcgaaattgattttttttctttctagtcaaaattcttctgacgcaagttccgggactttgccttttttttttgcttattgattgttttggttctgtaatagtattaaattatccattgggttattattttatcacgtgttgacgattatattcttctgctttatattagttttttctaattcctactgtcattctcgtattttaaaatcttgtaaattagaaatatctttatacggttaaattagcaaatggaatctgattagagctgagtttatattatagaacaataagtattttttttgtaactacgggttatctaattttatgatctgatttgcttcaaaaagtttgctcccaatgttcagattttttttgaatatttgtgtaatttctgagtgatatatatatatatatgaaatattacctaaattttctataaaacagaagaaaatggagactttaactattacttcggtagctgttacctgttccatgaaagtgttaatcggctgcttgttgggaagaattttcagtgttgttgttttggaggctttacctattacttgtaactgttatctttgtatattttcttttaaggcttgttttgtttgttcgccttttttggcctcatgtctctgggggtttctatgtacccgtcggctttgtatccgaaaagattttttcattttcggctctgtataactcaaacgcatttaatcaataaaatccttgcacacgaaaaaaaaaagaaaaaaaactaaaaggtgataatttaaatggttaaaaatccaagcattttaagatttttgttttatttgaaaataatgaaatttaaaagaaatcgttttgctaaattttcgatgttcgtatgtctagccactagagataaattttcttcaacaaaaagcaaacatgtggtaatccgaaaaatactaaggatgtgttttatagagttttaaacactaatattagtaaaacagaccatgagacttggttgaaatttgaaaacaaggaaaatgtttgtttcactcagaaatttcacaaatatccataaacaatacttgtttgcaatggagcagtcctaacgcaagacgaacatcacttgcctctaaagttttgtgattttatatagaatcctacgtagctgtccaaactgaagacgaggaaggcccaaaagctataagttcgggagctcgaaccctatttatctatttggaaaatcaccctgaacaatgtttcatatatcgattaaaagaaattccgacatgccattatagattagtttttagtttaatactataaacttttttctttttttttttctttgggcgaaagaatactatagactagtttttaatttaatactatagactagtttttaatttaatttaatactatttcaaaacagtgttcgattttacgagtgtgcactggtatatactcttgaagaattttttttcgtctaaattcttctcaatccacacaaattttatttgttatcaaattaactcatttttttcagaaataaactaaaatgagagaagaaaaaaaaattctaattttttttatttttttcatacctgtcacacccatatttatattaaaaaagaagatagagaataagatagtaaaaggaaaaagaaaaaaaaaaaaaaaaaaaaaaaaggaaaaagaagaaaaaatctacaactagtcaaaataaagtttttttttggtctcaaacatttacatttgaaattttttaccaaaagaataaaatatgtgctttataaattttttcttacatagaaatctagtacatatatcaagaagatttcaccatatcttatcttacaatatatatgatacatgatggggtttgactttttaaaatgggaaatattaactactaaaatgtagggggaaaaaactattgtcattcctaattttttgacaagaataaaaattaggatgatgttaatatatgaaatcaatcaacattgttatgagtatgcttttcaactttttatctaatttcatcttctttttcaattatcttctctaatttatgtttccctttatcagcctcctgctgtttttctcgacatgcctccgtacagaagggagtgtcactagattgacgagacaaaaaaacaatttagataaattacgataaaacagctaaatcaaatgctttttaaaaatgaaaaaacgtacttatacatgtagatgtcatcaagctttggacaaatctttttcttgcaaaaaccacattgatctgtgaagaagcttatttgctttagatctgcttgataacccatgataaaacctaattaagtttttgattgaagttagatatgaaaatagatgtttcagtatgagattgtatctgtatatataatagaacaagcttatgtaatacatcattttcaaccttatctcatgaagttatgtaaatgtttaatttttagcaaacatttcctagtaaggtaaatgatttaagagatttaaatatttatttataagaaaataatataataagaatgtattatatttttgttgacccaacaaaagaagaagtttaatcttatatgtacaacttttacggatgagaaattacaaaaatctatccaattacttaagaataccatatccttttatattttgattaaattaaaggaaaacataattatttcttcaccataatataactaaaattagagcttaattaaaatttattttaaattgaccaatttgagtgaataaacaatattttaaaaatcatacatgaattataaatatatagttaatacttaataattacaattattaaatattgtgataagcataaatttattatgactacaaaggtgttgaatttttttacacttgtaagactgagagaattaaaagagtctttaatacgtgacacatgtttttaattagttagattcccttctttttccaaaattctattcttctaatttataattgattattgctgaaaacaattaaaaactgtcttaacttattaatttgcattgcttgttccaatccacaatttaatttttgtatagggccaagacatgtgcattattatctcggttctaccttatctgagagaatggcaagttccaagaactgaaacttattgtcggtttatgaatccatgatcgaaagttggtcagtgtcaagtaaattttctagagcttacgcaaaaggtgttgcaaagacaagctagcttgagtactggtaagttgtggcattcgatacaacacttttattcatatatgcgtaatactaatcagattatgtgcttgtgttgttgcgtgatgcaacattttccggtaatgtcccttaagctatatgcagccaaatcagtccatgcatgattcgttcgtcaattagacattcagttcaacattaaacacgaaactatccaaaactaaaatgattttctgctcttattaagataaagatacactcacaagtcacatcacatgtagagagtgttggtaacaactcagaattcacaaaaacatgtgttcatagttgaatactaacctttcacaacatttctttttatatagcatttggacagacaatgatattgatggaaccattctgagatctataaccggacgatctaagtttcttcttgttcatgacaaagatacatctctttttctttcttctggtcattaacatgaacaagctcctccttgttgatcaccttgggatgaattcgaagttggtttcaggtttacatcaaccatatcctcatttttagtgtttgaatacgattccattcccggtaatgccgcagcgattttgcgaaacaaaggcttaatattgaatcctgctttcgcgctcgtctcaatgaacataactccgtattcacgacctttgctatctccttcctcaatagaaacttgcctgaaaaaattcacaagaaaaagaaaaaaataacatcttcaaaacaatctcatcaaatgaaaaaacagagaaattgtaatgttggcttatgatatcaaataccgtttttcgacaagatcagtcttgttaccgacaagaacaatgataacatcgccggctctttcattacggacttcttctatccacttggatgtgttgagaaatgagagtctattggctacatcataaacaacaactgcaacagaagaatctcttatgtaacttggtattaaactcctgaatctttcttgtccagctgtatccctaaaaacgaaaattcacattattagcttcctcattgcgaatattacattgcgagaagccctagaaaaaacagcatttcttaccatagctgcagacgaacagttcgatcttcaaggtacattgttttcgataagaagtcaattccaatagtagcctgtgaatgaaacaaagatttatgagactaatgtataaattttgtgaagattactacaactaaaagaaatttacattcagcattgtatctacatgatctatgtggtagataaattctaccggtagtctttaatttacgtgattgacgacgataatgtaataactaggattaatgaatgttgagataaagtgaggcaaaatcgagcctctaaaaatgttgtttcgatgatcaaaaacgttaaaaatgagacagaattaaaatcaaacagcaaaaacagagaaacagaatcatcgatgtggttttagatttaacctggtaggttgtgtcgaacttatcatacatgaaacgagtgatgatgctggttttgccgacagattgatctcctaagaacaccagtttatatttcgctaatggtgacaccgacgccattcttcttcttttgaaagatcgaaaatgttggattcagattctcaaattcctcggagaaatgtttgaagagaagatgaaagctggaggaagaagaaagaatagcctatttttggaaagttaagaaaccgccgagcacgttgacgaggacggcttgtgagaagtcaattttaccctttctctcgtattatgtccgttgaaaaaaaaacagaacacacatgaaagcctctcgaaccgtggaagactgaaacagagcaacacaaaaataaagagcgcgtgactgtaactcgctaagcatactaatgggcctagtggtgaatcgatgtttgggcctaacaaggaaaatagtttctctctacttataactagattgtgggcctgttgacaaaaaataactagattatgggcctggtgggtgaaagtggatacgacaaaagacttgcatgaactctttttgttgtataaggtacaaaaacaaatgtcaccttaattcttttgtgtttttgagttggccgaaaaataactaaaatccatttttatgtaagaaaattgagaacaagtggattagatatctataaaataataaaaatctaaaccaaaactaatatgaattgtttttggattggattgaaccagacaagacaaacaaatttgtccttcataaaccaattatacctttttaaaaagggtcctttcaccaaatttaccctatttatatttgtttttgtcggccaacgggccaagtgacattattttatttatttatatatattgttatatagtgtacactatgttttcacaaaatagaattttattttccaatcactttagagaactcagtccaagaggcaaaagcattcattaatgatagattaagcgacaattttaaaattaaacgtctcaaattagacagagatgactccatggcccaatggataaggcgctggtctacgaaaccagagactctgggttcgatccccagtggagtcgcctacttacttttgatatcttattcaaacgacatcatactaaaagaattttgaagccatttttttttgccttcgtcttctcaaatgattaaaagatgaagaaagaggcacagaaagagaagagaacacatgagcctgtgttgaagttctacattataaatgagaccgtagacaaaaaaagaccacacgaacacaaactactttgtttaaaactaaatcctaaacatgaacatattaagagtgtctgtcttaaaccaaaaaaaaaaaaaaaaaaaagtgtctgtggtttaagacttattttagaccaatgaaatgctgctctcgccaccaggaggtctcctcgcaccaccatagtaatcccgatattccgacttcccgtctgcaaatatattgtgtccgctcatttcccgctttttggctgagctttgcatcttctctgaataaccaggagggattttatcagatttgaagataccattgcttgtgagcccctgaaactgagacttctggttatgtatcttctttgatgacttcacaacatgttcttcactaaacaatctgttgctgctttgcccctgttaaatttttttattgaaacaggtcagttttctagccatcccaaaaatcatcatgatgtaatgacactacttacgtttgaggttttgacagatgcacgcgagctcctcggtgcagattcctccgtgttcttatttcctttaacttctgattgtgttgcaccaccaaacaagcggcgaggttggctttcaggagatgcaaagatgtcatgcccactcattgctttattcttggtgttcgatatctgtttcttcttacacttcgaatctgcttgggtttctacagtcctgctcaactccttttgcttagcagcctcgtttaaagtggttggtttctttggagtcacattctcttcaccgctgaaagatatctggcttctctacaaatccaataaccattacttagaataccattaccatcaactgaatccttgaaaagagtacaatggaggatgaaacaagtacctgatcttgatggtaatggattcttgtctggtgatttggatcatctttgccattcatgggagttgttgcattctcttcgccgctgaatgatatctggctcagctgcagaaccagtaaccattacataagataccattatcatcaactaactcctaacaaaagtaaaaatggatgagacaagtacctgatcctgatggtaatggattcttgtctggtgatttggatcatatttaccatcatcagagaatatgtcactaccagtcatttcttttagcttatgcccagaacagttcttcctatgcgaaacactgaaaagagacttggtacattcagaagcagattaaaccctaattcatcaaacaaaaccctaaatcaagcaaatcgagtttaacattgactaaattcaccagtaaaattgcttctccagaatcaatattaatccgataaatttaacaaaacctagaatcaacatagaaatcaattcgcatgaaaagagatgaaatcggttacttcgtattaagtgatttagtttccgcgttagtgatctgaccgccgccgccaagtacatcgttcattccatcagacggctgagaaaaatggataatcagaacgaaatttcactaatcgaaaccgaaatcagacgagtgatgagttctggccggcaaaacgaacctggttagagcgattagcggcggtggaatagtcaggacggcggatctcagaccaagaaagaagatcggcggtggaatgatgcggattgtttctctcctcttccataactctctgattcactgattcacactctctttgatcaaaacgttttcaaattctaaaactgaaaatttcgtttgtgagtgagaaatcttttatttattatttctttctatttattcgctttatatgttctgtcaaatgattttatttttgttttaaattttagtggacgttgctttttttttgttttttgtaacgtctatctttttagattacttttaaaacagagtttattgtatcagaaatattcaaagctatccaaataccaaaaaaggttgcgtaaagcctattcaaaggtcaatgaatatcaagcccaccttgtctacgactctatgatgctcggtttgcaaaacaagtatgaagggtgagtgtggatgcaagatctacactagtgaattatgcacacttcatgtttctagctagatgagtctaccatgtctttagatgaacagggattggtatggctgattgtgagtgatatttgcacttgatcaagtcatttctctaggggacaaggatgttaaagcgtcatgttgtttaagagagggactacacaagacaagactttgccactcttccttatcaatcttcccgtccaatttgcttcttgaaatgtctacaccaattgatgtttatagagaattaagatgagaagcttagaatatgtcaatggagaccaagatcaagcccaccttcttgcatatgatgctcaatttacaaaacaagcctgaatgtgaggttgatacgagtgccctctgcctttgcacgctttggcacagaatgaatccagtctctttgagtgtatcctctcatcaccagcaacgatccatgtttcaatgtcaaactttgttgatcctctctgctgcttctctttaacctcttcttagctggtccactgtctcctgttttccctgcaggttcacaccaaacaaaagttggcttgttcctggctatgcaggaaaacactttagcatgactcaaatgtcccattaccttgggaagattcttcatctttctttttcttcaacacaaaatcacgttcacatccaaacgagactgaagcaatttctggagttggaccataaatcttttcatcatctgcatgccaagccacataatcactggcacctttgtatctatttaagagcaagctgttgaatctgcttccaggaagcaccttgtaaatctgacaagacgaaatagaaacgttttagttcaaacaaccactagaacacagggacatagcatagttgttttcaatcttacagcatccagaatctccttgagaggtgggaaatcatcccacgaataggaggtaggtcgatatccactgtacaccaacgcagtcaatccgctacttgcaacataacaagtatctctcggctacaggtggcaaatgcatatgtattagaaggccacaaacacaagttatacaggacttcacatgattgtgacttagatttctgagatacaagttgaatccaagcatggaaatggccctggcaatctttgttcctcacattgcacaatactcaatgtaacccgcgaggagacacaataaagcttcaatggatcatatgtatacaaaaacaaatgacagagaaagaggaagtggggaaacctggaggcaagatcgaccaaagacacgaatagtaggcctggtccaaggaatatgcttgtcgagataatcgaagaaagtccaagattgttgaaatggaagaaacctctgaatgtaaatgaggtcgcttccatggccaagatcaatggtttttctagagggagcgttgctcgatgaaggagactccaccgccacaatcgatgtcaaactcatcctccgctacacagcaaacatacaacatcactcagaaaggaggcctacttctctagaagctcatatttagtgtataagcacaagttgtcttttacgtagtaattgaatgagacaaatacctgatcctgatggtaatggaatcttttcttggtatctgaatcatctttaccattgtcagagaatgtgtcactatcagttacttcttttagcttgtgccctgaacagttcttcctatatgaaacattgaaaaggcttggaaccaaaaaaccattttgtgaagaaaaccacattcaaaagcagactaaatcctaaagcatgcaaatttagtttaagcaacattgcttcttcccaattagtaaatccggaagaaacattcgcatgaaaaagatgaagtcattacttgttaattagtgattcagcttcctcattggtgatttgaccgtcgctgattccatcagaagacggctgagaaaatggataatcagaacggaatcacacttttgtcggaacataatcaaaactgacgatgagttatcgccggaaaacatacctggttagagcgattagcggcggtggaattaagtggattcgtcatgtttcgctcctccttaatctcacctttttctgtgattctaaacaaaaacggtaaccgaataatttaaatcgaactaaaccggaaatgctaaaactagaaaatcgaaacagattaaaaaattcgattggtttcagtaattgaacaaaccgagatattcgtgtattcgatttcgaacccttgttaaaagtttacccgagcaatggagcgaagaggacatggtcgtattcagtctctccagtgtctcaagtccgagagaaaagtctggtcctcttagtgaaccaaaatcaattttatattgttgtcgatttattacggttcaatatttgagatgacggtattaagcacaggttttgtacggttcaatttcggtttaatcctgttttgtaaagttaaaacgtaaaatcccaaaaccgagaaacttgtccttgtctttcttttcttctccaaaagagcttgcttagttacttgctttcctgaatctgatccctggttcgtttctcttctctccttgttaaattaagagttaagtaagtttggcatcgagtgtctgttgttgtgatccttgtttattctcgtagcaatctcactccaaagcttctaagttataatccttattttaggcatttacttgatcccaagattggagtctattaactagattatgcctaatgccttaagaatattaactttttttatagctatagatatatattttcccatatttttaggattaagattagggtttaatgattgaataatatagttatacaagtgtgtgactgataaaatgaaacaaacgaaaaatctttcccggtgacatcatcagccgccggcgactagctttctaactctggtttgcaaattcaaagggttggttggtggctaattttgaacatatataaatgtcattttaaaatatttttaatttcattttcttaacattgttccaccaactcctcccacattctctccgcctctctcgtttacaaatcccacctcaaaggtcgactctttatctctcttctcaccaacccaacttctccaatggcttctcagagttcagtcgccgtcatttcctccgccgccgccagaggtgaatcattcccagattcaaagaaaccaatcgggtcagttcggttccaacaacccctccgtctctccttctcgtgagtttcgtctctattctaatcttcgattcaatttcgtcacttttgagcactcttttgattagaaatctgaatcattgctccaatcactggtcaatgtagttgacttaggtctctgtaatggttaggtactgtaagtcagggaatatgtcatctagaatctgcgctatggccaaaccaaatgatgctgagactctttcatcatcagtagatatgtcacttagcccgcgagttcagtccttaaaaccttccaagactatggttataaccgatcttgcagccactcttgttcaatccggtgttccggttattagactagctgcgggagaacccgatttcgacactcccaaagtcgtagctgaggttaatacatttctcctactggttttgccatgttctgtctctctctgtggtttgttctgaatcgattgtttcgtataggctgggatcaacgcgattcgagaaggttttactaggtatacgttaaatgcaggtattacagaactcagagaagcaatatgtcgaaagctaaaaggtataaagaaacgcttttgctttgtaaatcagttatgtcgaaacggagtcaaattgtttgtattctggttgttttcagaggagaatggattgtcttatgcgcctgatcagatcttggttagtaatggagctaaacaaagtctcttacaagcagtgcttgcagtttgttctcctggagatgaagtaattaaaaccgtgtctttcgagcttttgttgaattctttcgatgtgattttgtttgtaacaatgaattgtatttcactaggttataattcctgcaccgtattgggtgagttacacagaacaggcgagattggctgatgcaacgcccgtggttattcctaccaagatttctaacaattttttgttggatccaaaggatcttgagtctaaattgactgaaaaatctagacttcttattctctgctctccttccaaccctactggatctgtttaccccaagagtttgctcgaagagattgcacggatcattgctaagcatccaagacttctggtatatagcataaaacgcctccttggtctttttaagtcagtttgtttttgctgaactgtttaagctggaaaacaaaactctgtttcgttcatttcttttataggtgctttcggatgaaatatatgaacacattatttatgcacctgcaacacacacaagctttgcttctttgcctgacatgtatgaaagaactttgacagtaaacggtttctcaaaggtaaagtatttattattgagttggcttctaatgtcgaccgatcaaattcttctttactgatcatatgatatgtaaaggctttcgcaatgacgggttggaggcttggatatcttgctggtcctaaacatattgtggcagcttgcagtaaattacaaggccaggtatctagatataaacatatttctctctaaatctttatcgaaaaaatgcagcgatcatgagatgaaatcggttctggtttttgttttaaggttagttcaggagctagtagcattgctcagaaagcaggtgttgctgcgcttgggttaggcaaagctggaggagaaacggttgcagagatggttaaagcttatagagaaagacgagatttcttggttaaaagcttaggtgatatcaaaggtgttaagatctctgaacctcaggtacctctccgtttatctttgaggctattactggctagtttcttcttcgtctttttcttgattgttggcattgtttacttgcagggagctttttatctctttattgacttcagtgcttactatggatcagaagctgaaggttttggtttgatcaatgattcgtcgtctcttgcactatactttcttgacaagtttcaggtaaacttcgtctacaaaatgttcttctttaccttcaagaagcacaaaacagctcttgaacatagacttgagaaagatttggacatttttttgttctgtttttaacaagttcatatgtttggctctgtttgtttaaaaggttgcaatggttcctggtgatgcttttggagatgatagttgtatccgaatatcttatgccacatctctcgacgttcttcaagcagctgttgagaagatcaggaaagcccttgagccactccgtgccactgtctccgtttaacagttcggacacagaaatgtgtttaagattgtttatgatatgttgtaacttatttatcagctttgtctccaatccaataaaaagtctttttctatgctttgttcgttccttcaaattcatatataaccataaacaattatcttaattgtaaatcatttattagtatttaaggttgcttgtgtaataaggttatatccgattatgtcaaaatattaagaagttaaatcgttgcacagttggaaaaaaatccttgaaggagctcaaaaccattgcgcaacagtgcgttcctttggtacgtcgtcgtggaaacaacaattgtcctctaaatctactaatcagtctcatccacttgcattctttggttagatgatcagattattggtgttggattttgcacgaaccgggtccaataagaagtccatctaaagacgatctatgagaacttttcctgtctaattccttttgacgattattaaaaatcaccacaccgatttttttttgtagtacattcatttattgtaaacatttttagtccaaaaaacatgttttttaaatcaaattttgtaatcgttaggtgaattaaaagtaatcataaacaaacaaacaaaaaatgtgtgtccagcaagaattgatattaaatcacggccaaattatactaactgaccctagaaacgtctcaaattattcaatcagatcatttttcataaagtaaacagtgaaagcaagtaaataaaaacaaaagaaaacaagaagaatatgaaaagaggacaaagctcgttgtgtggcttgaaatgtatacggctataagaagaggccatgaaaaggggaaaaaaaattgttggtagggtgcacaagaaaaaaaaaatctgttggttgaaaaatttaatttgttatcaaaacgaacgaatggtcactgctttatcaaaaaatatgtttttttttaactacatcataaattgacatgcatgcatgcagatccgtgatagtatgaagtatgaactcagacatgaaaacatccaactacaaaaaaattagaatttgtttggtcatttctaatatataggaccactcatgcatgtttacacaaattaagtaataaacccacttcccactttgtggcttttgctttaaccacaatcatcacgcttttggtttgtggtcactgcttcggctgctacagtcactcacaaggtccacaattattcacgatcgactcgactctttgacaacgacgtttctaattataaccctcgtgatttaatgatatcgctaggacaatgttcaccataaaaacttcaacatataaacaagcaagtggttgtgtagtactacgtataagctttcagtctttctatcaatagttgaatcttgcactctagttcaattattcgtttggaggagttatgatccatggtccaaagatatttatagatcactttggtctaaaacttcttggttaaacaaaaaaaaacgttgaaagatatacaataaaacctctataaattaataatattgaaattgcaaaattttattaatttagagaggtattaatttattaatttatcgataaattaatatttattaatttatacagagattttcttaatttagtaacttttttaaaaaatttataagatttttttcattatagaaaataactttctagaaccagttacaagtataacataataataatgactaccaaaaaacaccaaaagttttgatacactaaaatatgaaaactatagtcaaacaaagaacaattatgaatttaagcaaaaaattattagaaaatatattttacagattttttttacatataatatatataaactaaattttatcccgcggtgacaatttatctttttaaagttagtataatttttttttgcaaattgtatctatctataatatatttttattttatagtttacaattgttattaagtaacgtcctgccaaacccgttccgtaaaaaaaccatttatttatattaatgttgatcttatttatgatatgtttataaatcattgtctaaatttttttgtcgatgcgggacgttgaacccacacattttttgctaattggttaatatatgttcatttttaaaattttgaatcataaaatatgacggaaaaaattaagatgttttttaaactctatatattatataatgatgttaaaaaattgtaatatttcaaactatttataagtttaaatattaataatgttttataaattctaaatatataaataataatatttaaaaaattaatatttttgtttataaggtaatgacacaataactcttaaagcaaggatttagaagatttaaatctttaattaaatattttcattaataaataattaatgtcagtgacatgacattataaataagttcaaatacaaaatttatttatttaaacaaaaaacgtttagtaagaataatatttatttaacaaaaaactttgttttaaaatattgttaacaaatatgtttatgctaattttaagggattgatttgaagtttggtgggattaaatttgattgataatgtgattgacaatttaaatcaaaaatttaaagtaaaattaattattttggaaaaaagatttaatgctaatggcagtaaattgtaaataagtcgaagtccaggatttatttgctaaaatgtatatatatatatataatacatttatacaattattaatttatgatattgatgggatcatatatttacatagcactttcaaaaaatttattatcttattaatttatcgatttgtgtcactttttatactggtctcaagttcggaccggaaaaatttattaatttatagaagttattaatttataaagtattaatttatagaggttctactgtatatcatagacgtatacgacatagattagagtataaaaaaaatacacatcgtcacctatgatggaaacttaaactacatgcatcactgatcacttgtaaacatcttcgcaaaagacttcacagcaaataaaaggttttgcaacatattcttcataacaaacaattctacttgaaccataattatagtgaattttttcttacatctacaacacatgtacagaaaaacgaaacacactaattaatatgttagataaattcacgtgtacaatatagcaaattgcattttcttggaattccattagttacaaccttcatcgactatcgaacgattcaaattacattagaatttgttctttgtttcatagatttatgtatcaacgagttgtcatttcacgcaaaattttgattaaatagttcatatagtcccatcgaacttgattttcatattctacctatattaattagtgaaaatttgaaaatatctatcttcacaaaatcacaataccttaaaaacctagttgaattctattgactattttttagtaacgtttatttacattacatgcatctagattttatccaaaccaaagtgcaaaaatggcgaaaaatattttaccatctcctgtggtaaaaaaaaaacatttaccatctccagtacaaagtaagtcaataattattgttgaaggacctacgcactactactaggccctagttcaaaaattggtctctcacgcgccatcacgaaacgtgacaccacatctttgccacgtgtccatacagcttccaaacaacagatcgcgcttggcacccacgcgtttctcagtggccaaacgatgtcgtttaactgcagtgtcccacgacaacaaccgcttcttcttcctcatccctcgggtgtcttcgagtgtgttcacagatttacaaagaaacttgtcttcacgttaatcacgccacgtgtctgaacccaatttccaacgtgtctctcacattctcgaattcgactcttttagtggttctcgtcctctctgggcttttagactgggctcgaaccatctccattccaccgataacatcgaaacccgccacgtgtcctccctcctctgtctctcgtctatatatccacgctcttgttcgtcgattcgagatcacacacacaaccaccaaacacaaagcttttcaaaacccagagaaaatgttcatcgagagcttcaaagtagagagtccaaatgtcaaatacacagagaatgagatcaattcggtgtacgattacgaaacaacagaggtcgtccacgagaatcgtaacggtacatatcaatgggtcgtgaagccaaagactgtcaaatacgatttcaaaacagacactcgtgtccccaaattagggtaaataaaatccaaatctttcacttcttttggaattttaaatcacgaattcatctgggtcggtgttaacattcacattttgaaactttttgcgtggatagggttatgcttgttggttggggaggaaacaatggatcaacactaaccgctggtgtcattgctaacaaagagtgagttaaaaacaaacactttatatgcaatctttgactttggtttttgaatttggtaaaattatgttgtagaggaatatcgtgggcgactaaagacaaagtgcaacaagctaattactttggttcacttactcaagcttcatcgattcgtgttggctcttacaatggtgaagagatctatgctcctttcaagagtcttcttccaatggtgaatccagaggatgttgtgtttggtggttgggatataagtgacatgaatttagcagacgctatggctagagctagagttcttgatattgatctgcagaaacaacttagaccttacatggagaacatgatcccacttcctggtatctatgaccctgatttcatcgctgctaatcaaggttcacgtgctaatagcgtgatcaaaggtaccaagaaggaacaagttgatcacatcatcaaggacatgaggtatatagtcttacatagcaaaattagttagttagttagtgtattgatgtgtttgaatatttttagggagtttaaggagaagaacaaagtggataagttggttgtgttatggactgcaaacacagagcgttatagcaatgtgattgtaggacttaacgatacgacggagaatctattggcttctgttgaaaaggacgagtctgagatctcgccgtctacgttgtatgcgattgcttgtgttcttgaaggcattcctttcatcaatgggagtcctcagaatacttttgtccccggtcttatcgaattggctatatcgaagaattgtttgattggtggggatgatttcaagagtggtcagactaagatgaaatccgttttggttgatttccttgttggagctggcattaaggtaatagaattaaagcttgtttatcaagtaacctaacttgcttctcttctgttagtgaaggaactaagaatggattttgtggcagcctacttcgattgtgagctataatcatttgggaaacaacgacgggatgaacctctcagcgccacagactttccgctctaaggagatttcaaagagcaatgttgtagacgacatggtagctagtaatggcatcctctttgagcctggtgaacaccctgaccatgtcgttgtcatcaaggtttgattttgaatcagaggccagagtgatcaattcctcctttctttttaagtacattttaaagtcttaaatcctgctattgttctgaatgttttgcagtatgtgccatatgttgcggatagtaaaagagcaatggatgagtacacgtctgagatattcatgggagggaggaacactatagtgttgcataacacttgtgaggactctctcttggctgcaccaattatcttggatcttgtccttctcgctgaactcagcaccagaatccaatttaaagctgaaggagaggtttgtattccgttagttagttaccaagaaactcgagattggtgagtttttttttttcatgtttgaatctattctctttcaggggaagtttcactctttccacccggtagctaccatactcagttacctcacaaaggcacctcttgtaccgcccggaacaccggtggttaacgctctgtcgaagcagcgggcaatgctggaaaacattcttagggcatgtgttgggcttgcgccagagaacaacatgatcatggagtacaagtgaaggatgaggaagaagaagtaaaggtacctaagatgaccttaggatatgaaggacactgctccattgtttcatttatatatatcattttgtatgtatattatatgaatgtgtgtgtgacggataatatggataagcttagggttaacttgtgtgatatggatctggtcggtttatttggtgagaagattagctaagcttttggatcaaatgtgtaaaagatttaagtaattatgcttgtgtctccttgtaatataaccaaacttatgatctatgaatatggattttcaaaatcaaaatctctgtatttgtatcttatgaatgttcataaattggagacagcaataaagacacgaagggcaaaagtagctcatataaatgtcgaaaacataaagctgtcttgtctagattttcgaataacagaagaagcataagaagagtccacatgtgggaagtgagaccattaatgggtgagatcaagaactaccagcagaaaccatcatgaactcgccttcacacaccagagcaccacccacataagctttaccttccattttagcgagcccgaaccgcttctggaacttgagaagagtcatcctcatgactagcgtgtctcctgcaatcactggtttgcgaaatctcactttatcaataccagcaaagaagaagttatcttgagagcctcctacttccggctgcagcattactatacctccgacttgcgccattgcctgcaatacacaaactctgacttttcagtgaaatgatcttcaagacattaatactcaaccatatggcggttatcttttttatagaggatctgtgatcctctatcgggattcagaatccaaaacctctaccaaattagcgagatcattaacctctttcaagcttaaagttgcatatttctactacgcagactcgagttttcagtatcaaagctgcagatagcttcacacattttggatcaagtttttagcaaagtgaagttgaagtccctcaactataatatactcatcactctatcagaccacagaaggacaattcaattaccaaccaggtgaagatctcgcgctaatctatcaggattcagaatccaaactagcagatcattaacctcttatcatagttaacatccatcttcgattaaaacagtagcgaacattaaagcattttgaaaggaatacaacagctaacatatcaattacaaaatatttgatcttcttgaggacaaaagtttgcaactttaaacgattattattacctcaatcatgagaacaccaggcatgattggtcgttcagggaaatggccagggaagaaattgtcattgatggtgacattcttaatagctacagctgaaacaccaggcgtatactctatcactctatctaccagcagaaacggaaacctaaaatccaagaaccataatgtcaaattccagaaagatcaaaacttcaaacatgggtttcaacgaaaactcatcaaatcaccgaaagttgaagtcttatgaatattttatacctgtgaggcaatatctctctgatttggttaatgtccattaccgttggaaatgctgggaattctggggattaagagaaacagattgagtaagagaatgacgaatgtcggaaacattagaaatcgagagaaaaatcttactgagttcgattggtgtttccttttcggttgaggtgctatcgccatttgttgaacaacgaagcgtgagagaattggatcgcttgttgggtgggagagaaacagagtgagatctggaggaagatagatggagaggttgatgatgatgatgatgaatcagtgagtcagaacttaggaaaagtaccgagttagaagtagtagccattgtcgagtaacagtgaagagagtttagagagaatgtgagagatgttgtttttgcaggtgaaggagcggagagtacaaaggtttgtgttagttgaagcagagatagtgacaaattcataggttttgaatatattcatacaatggaaacaatataacaagtggcctattagctcagttggttagagcgtcgtgctaataacgcgaaggtcacaggttcgatccctgtataggccatttctttttttctttttttggtccttcgtagcctttttttggaacaaacaaggttgactgttccttttgatgaaccgaatcgaaccgctaaccaaactcattttaaaaagtcaccgatttttacgattttagagttgcatttgtgcataaccaaaggcacatagactaggtgccagtatatgaaatttgttccagttgactaatttataaaaaataatcacatctttagctggatccacaaaattaggtcagggttcatgacctttttagcattgttttagattatcttgaccattagttgtggtgagagttgacaatttaaaaagtcaactagtttttaaaattaaataccataacaaatgatgcttaatatatatgctttaatgcttatagttatttaaactttataagtaccataatttttttttttttttttctcgatctaactccatctattattctacggatataagctctcctctaaagagagccaatcgggaatcgttgaacttacatgggaaaaacagaatccgtgtgctcttgcacattttgcaaggtaatctgcacgaatattactagttcgaggaacgtagttaatatttaaagatacaagtttatctctaaaaatcttgaaatcttctagctccgatgcaaaattaggccactcctccggggtattaaccatggtgataagatctgagcaatccgtcataacttgtaccctcgatatcgacaatcccaccatgcacttcaaggcccaaactaatgtgtctaattccgcgtgaagcggtgataaacaacgtcgtgatcccttcaatcccaagtgtaacagtctttccccgatgttcaatatccacccatgaccacttcgaggttcagatacatgccacgacccatcaataaagcacactggaacgtccaaaggtaaaattgggacttgcaaacatggcaccgtctcctccacttgctcctctctcatgttggctctcctccaaacttcttcctcttggattgccaatcctaaagtgtcttgaggttggacgcaaatattttcaaaaatctttcgatttcgcgctttccaaatataccacatgatccacggaaaaatccgtaggctctcctcgctagctccaatctcctttgctctccaatacaaataatccagattattgtatatagagggcgacggaaacctagatagagaggagggaataccggacaaagcccagacttgtctcgctggtggacaatcaaatagcaaatggttgatggtttcctcattagccccacatctgggacactttttatctctaccaatatggcgaaaatgtagtcgttgacatgttgccaaacaacctgacacacattgccacacaaaatgcttaagctttcgtgtagtttttaacttccacgcttgcgcctttagtgctgaaacactaggtccctgaaaagggtggtcacaagacgggcgagagatagctctcgcggcttcatatcctgtcttgacggtataattacctgatttggtcatagtccaactatatccatctcgcgaggcatttaagctcggttttatccctaaaatgagggtaatatctttgggggggaagagctcacgtaaccgatctactttccactgtttcgtttcaaaatcaatcaaggtatttacatagatcagaggttttctatccgtagctagacctttcggtggtcttggggagatatctgggatccatggatcagtccaaatacaagtctcaaaacccgacccaatggtcctacgaatcccggccttgagaacatgtttggcagcaagcatactcctccagccatacgatggccgattggatactgtaatctctaatgggctactatatctgaagtatcttcccttaaggattcgactaaggagggagtccgggaatcttaagagtcgccataattgcttcgccaaaagtgcgagttaaagtcttcaagggtcctgaatcctagacccccatcagatagttgagtacatagttggtcccatgcaatccaatgtaaccctttactatccgctttgttactccaccaaaatttggcgatcgcactacttagcttggaagtaaccgcttttggtaggaggaagcacgacataacatatgtcggaagggcttgggcttgagatttgatcagcacttctttccctcctttggagagaaatttggatgtccacgtgtttacccttgtttgtaatctatctctcgcaaaagcaaagacttgagctttggatccatgaatcttttcagggagtcctagataagtttccataccaccttcttgcgaaatccccattcttgtctttatctcttgtcgaatagaaggggaaacctcattaccaaacataatggatgattttgctaggttaatctcttgccctgaaacccttttggatcgccgtttaacaagaccctataagtcactgatgtaatgcactgcattatccaaccaatccatcttgggtcaaaacccattttttccattaatgcacgtagaaaatctcactctactctatcataggccttgctcatatcagttttgagtgccataaaattctttcggttcgatgggttagaacggagtgcgtgaaaattttcttgagcaataaaaatattatcagtgattaatcgtcccgctacaaacgcggattgtgtctcggatataagctctggaagaaacttcttgaggcgtagactcagaatttttgacaccactttatagcttacattacattaactaataggacggaaaccagacatttccctaggcctatccccttttgggataaggcaaatgttggtctcatttagctttccatcaaagataccagatctaaagaaattcttcaccaaattggtgagatcaccttttataatgtcccaaaaacgttggtaaaaaagtgccatcatcccgtctgatcctggtgcttttcccgggtttaatgagaataaagctcttttcacctcctcttctgtaacctccttggttagagcctcgttcatccttggagtaaccgcaacatggacatctttaaggacattagtgggatctctcgaaaccgaggaagaaaagaagttatcaaagtagctcacggcgactttctcgataccttcttcattatcaacccacactctattttgatcgaggataccaattattctgttcctagcccgcctttgtttagttgaagcgtgaaaatatttggtatttgtatctcctaataccatccaaacttgtctactcttttggtaccaaaagatttcttataagtaccataatttgatttgaggaaagttgactgaacaaccgcaagaagcgtaaatggactaaacccatagtaattgattcatgatgaatcaatatgtaacgtgaaactttacaaaggagaaatctagtggagtttagcaaacgaatcgattttatgactggaccacatattaaattacataataaatcacataatctgtaaatattttaataacatatttatttgtcacaccaacattcgcatggatcattttcattccaaaaaaaaaagaaagaagaagaaaaaaatactcacatggatgatgttattagtattataattgttattctattatgcggaagcattaaaccagaacacatatcttagccaatttagtaacaaatttgtcacggaattgactggtaatcaatgtagagattggaaatcaaccacaaatcaacgttcaattgcttttccttttgttctttcaaagctttctctctataaaacgttctttttatccatctaaagttctctttgtgtcaatgggcacaaagctcatcaaagctctttttttgtctctctacaatcatcttttcatcttagtataatcgtattctttgggaattaactttccaattaccggttcgatatactgtcatatcatgggcgtaatacgattataaagtataaaccaacaataacctattcctatttttttctatctacctcgtacttttaatctatgttgcatagcaacagaaacggaaacacggaaacgaaacgtttcgaaaaccgaaaacaatttttttttaaaattaaggaacgcaaacgttttggaaacttagacatatatatatatatatatatatatattttaaacaacaaaaatctaaaacataaatatcaaatagataaagtaaaattcttaaaaataaagattaaaaagcgtaatatcaaatatttagaccatcattttcattagttccattaaaaatcatatgaagcacatgagatttgattcgtcgagagaaagatcttaaaacttgagtctcccaaaattagttaaatctttatctttccaaacttttattattattaagtttccaaagtaaaaaaataagattttttgcgtttctaaaatataaaaaatttcatcgtgtttccaaatataaaattttaggaaacgcgtttttgtgaatttccatcgaatttccaagagtttccgttttctgaaatgtttcggaaacggaaaacgcactgcggagagaatttccatgcaattagcttttaatatatttgtccaaatgaaagtaaaatgttcataatataaaaggtgccatattccaagagttattggtcctttcacttgatcgttaaatggttggaaagcaaattggcctttcaacgaatcctagaatcaacaattcatttgtttttattttctagctcctacaaaattctatatctaaataataatattgttaatcaattaattagtttttttcagggtatatattctgtatatattattaaataaaagttcgaaaaaagaaattaaatgtggaaagcatgtagctacaataactccccaaccaaccatgtgtgttaaactttcaccactttatcttcaaccttatcatcatatatatattttttgaaaatttctaacaacatataatcttacaaatagacttgagtattcatctaaaagtatagttacatgattaggtcactaaacaaatttttaaattttcaacttgtggaagttgtgattaatttgatttttaagctccatttccatcatacagaatattggtacaacaaattatcctccaacattgagtcatatattacgtgttcaacttcaaagtaaaacatgtctaaattcacaaccgaaaacccacatattatagagaacttgccccatatagcccctatattatattccccggaaacggctagatccaaagcacatgtagacatggcaatttcctattggtttactccggccatggattgattaaaacgattattgccttaaatattcagacgaattcaatggcctttaaaaggcggagagcttcagaacaagcaacataacgagagattttttatatataaaaaataaaggaagcacgagttcaccttaaaaatttgagtttctcttttcttgaccctgaagtttcgttttgatcaatttcacccatttctttgttcgtcgtcttttctttcaaaagggtttcatctttgtattataaaaatccaaactttatatcttcacaagcagcaaagatctctatttcaatcctctcatggaaactgcttctctttctttccctgtcccaaacacgagcttcggtgtaaacaaatctatgcctctcggtctaaaccagctcacaccataccaaattcatcagattcagaaccagcttaaccatagacgtagcacaatctcaaacctctctccaaaccgtatcagaatgaagaacttaacaccttctacctccaaaaccaagaatctctacagaggcgtaaggcaaaggcactgggggaaatgggtcgctgagatccgtttgcccaagaaccggacccgtctctggctcgggacattcgaaaccgccgaaaaagccgccttagcttacgaccaagctgcttttcagctccgtggagatatcgcgaagcttaacttcccaaacctcatacacgaagacatgaatcctctcccttcctctgttgataccaagcttcaagctatctgcaaaagtttgagaaaaacagaggaaatttgctctgtttctgatcaaacaaaggagtactctgtttactctgtttcagataaaacagagcttttcctgccaaaagcagagcttttcttgcctaaaagagagcatttggagacaaatgagctctctaatgagtcaccgagaagcgatgagacctcgttgttggatgagtcgcaggcggaatattcatcgtcggataaaacattcctggatttctcggatactgagtttgaagagattggaagtttcgggcttcggaagtttccttcggtggagattgattgggatgcaattagtaaactggccaattcttaaagtcttctattttatattaatcttctgtgcaactgaaattttcaacaagttgcagatgagtttattaggtttgaatctgtcctagttttctttgttggtcgtatagagttttactatgtagctaatctccatgtttggtttggcttggtaagtttttaaggtcctcgtcatcaacaaaccggagaaagtttatgtattcaaaagctatgtattatatcctcacatctacttatgagagtgagatcaaagtttgtaaaatgaagtcttgatttcttcttttagttctctcttttttaaaaccaaatgtatttcttttttttgtgtttcttattatgcatgctaattcctgatttcagtttacgaatgtattttatttcatttttcaatcctctgtttcaacttgaagctactcttgacaacccaatcggagccaaaatacctttgggccttctcggccttgttttagtgcccaacatcaagattggataagatatataaatacgaagcccaaaagatatggaattgtaaggactaaagacgattaagtatattttttccaatatggtggtatatttgtgaggagtattgattttttttaatcacaaaatgatggttaattatatattagtagttagtatggagtacctttcaattctatataacgttactgtcaaatttttagatattgagttaagtaattaaaaaatcgcgtcaagttattgataaaaaataggtttatggttaatgcaagacacgtagaaaaagcataattccaacactaatatctccatcaccaactgtttccgttgataccgttgagtgcctttgattctacaaaaaaaagccatgattacttattttatggggttggtgactcttcttttacatcctgcattgtgttttttaattatagaaatgaacacacttcgttctcttatgcataagcttgaatgttatttagcaaattaaccatataatctatcgtttattgttgcatttgttcttgatttatgatgctaaagacgtttatttggcaaattaacactatcgtctatcgtttgttgtgtgttttgtttgatagatcgtgtagaatatagtgattatatcgactgaaaatcgaggaaaacataagtgattcattttaaggattagcgacttttggagaaagtgaagagttatctaagacactctccttttaagccattcatagataatattgtatgcagacactagttgattttgttattcaataggaatttatatatttatcttggcaaatttgcccaattctctactaccttcctctcttttttttatgaacagtgggtggggtttactacatttaaaaataaattttacaattatgaattgcttttcatgtgaattcattcaaagaattaaagaaaactcgaaagtgaaactgttgttccagcaacaaactttttcaaaatcactcttttaatatgattcagaatcaatcattttaaatagtgattttactagtcttgtaccagatcacataataatttatttttagctaaaagcatgaaagtatatctagacttcgtgctttattgatatgcgatgaacaattttttttatatatactaaattacgatgatcatgttaaaaaaccgaaatcgataataatctgcataataatttttgcatatatttaatcccgctttagagaaacatttcccaatgattgcccatgttatccattagaccattactgattacactcaaaataaaaaacaaatggcaacttgtacatactatcgatattttaaaaatatgatccgatatataagaaaagtaaaagctatgttgcaaattgacattattaaaattttcacaagcattattggttattacttacttacttataatatttgagggtgggaattgatgtataatgtataccttaatattaaaagcccgatcgactagttacggttgtagttggattgtatttaaaactatagattaattgttgtagaaattagtatgtggggattcaaatgtgtttcatacttcgagtgtaaaacataattgttgcttttagaaaaaactaataattaattctataatatatatttttataacaaatttgttagaatgatttgaaatggagcaaataaaacttgtacaaatgtcgtattttggttgaaaccaattatggatttgccatttttttgaatggcatttgtggtttttgtcattttttaaaataatttgtggatttatccttttgcaggttacaaaaatatgatttaacatgtattttactaaatgttctgaaatttggtctcgatggcatattacggcgaagagttgctaggtgaggatggactgccgcgatttttgcttaaatcggtgaaaatgaaaatcttcttaaaactttagcttttgactatgaatccttaaaataattatagatatgtactattttggttaaattatatgagaaaatgatataaaaaaattggaagaaaaacggaaaacaagttgtgaaaacgcagacaacttgtctcaattagggattttgggaagaagatgactccataacgaaaacactaatttttccctttttattaagttaaaaaaaaaaattcgagaaaagtgcaattgaaaacatcgaactaggggctgcagatatttagatatttagtaggttgttagtaccactaggctatcagaattttacttaatttcatcgtttacatttattgtataacctaaatatttataaaaacataaaatatacaacatctagtttccgactaattcccgcttaaaccgactaggcatgcagcgctagatcaccgccaaaatagcgtgtagtgatttttagaacactggttttactcgttatgtttaggttaatcggtttcatttgtttttaggatttagtatttgatataaattaaagtttgcaattttgcaaagaaattgataaatacgtatatttttaagtgtttgacaataaaaaatatagtaaaaatgccaaaatcaacaataatctcttttgattacattttaaacttttatgattattttttctttttcagaatatctaagagaatttgagcatagacctattggagaccaaaatttaatatgatttcctctttaggttttgtatgagatattatacccgttacactattgaaattggatacatttataattgtttcttgggaaacaaaattatgtatgtgttatgtattgtccttgaaaccatttcataacaacatgatgaattgaatgttaaatatattgagaacaactttattgatgcttttaaattattattcccaaaatcttaaagccatcgacctttctatttctcctttatttcttttagtttccttatatagtcgaggggccgaaaatgattgaactggattttattttgtctgatataaatttcttttcttattcatttaatttaaaacaaaaatataaaaaatcgtatagtatttttcatttctgaaactcgtaaacatttcaaagctgtattaacaataatgtagcatactatttaaatttttctgtgaaccttaaaatccactatagtattttattttcttacgaacaatagggaaaataattgttgtgtttgcagactttgcactatatatacttgccgatttggtatgaactgtgaagggcaatgttctttcttgtggcattccttttatcttttgccgacaaagattcccaccatataaaggaacttggtgtttcatcaagtgcctcccaaaaagtttattctaaatattttaaatataaagtatagaacttgtgtcagtgtcatttgttgtatttctatccaaaatcaaatacggagaaaaaattatggatctgattggtaaccaaaagcagtacaaattttttaactgttaattagagttgttagctttatcggaatatagtgcaaagctgttagaaagagctgtacaaaaaagatgagaataaaattttttataacgtttttaatagtttttgtgattgataactgttaaagtttgaacaaaactgtactatgttaccattcaaaccctatgactttcacaaatgtagtaaatcttcacacagttcaacgtaattttaaaatttcacaagcttttgacatgtagacttcaataaaaaaaaaagaatgttttggtgtaggtctgtatgatgagacatttaatccctaatgtagataaaaagtataccaggaaatgattgcaaggcagaaactattgtggccgttgaaagaattcacgtggcatgatgattcttttgtgtcgatcccatcttaattatggtgagcgtttggggataggattccgttagcagcctttaataattaagttcatgttctcaaggaacaacagatccagattaaatatttttcatcatgattttagcgcaaaaaaaataaaaaaatcaggaatctgttttaaaattcactaattgtttttaaaggaactgaactgtcctggtaattaattaatggtgcttggttgttctttagaaaaaaaaaattttttctaaagacgacgagaagtaaaatgatagaatccttaaacaaaaagaacaaaaaaaggtaaaatgataatgattaggttatatattcctcatgcacgacatcttcctacatgttttttacgtcgcagttctaagcatttcatttctctattgattattacattattgggtaattcattttgaaattgagaagttccttttctgcaaaccctaattgatgataatgtcacgataaaatttgaacttttttctatctttcgatgaagtggatagtacttgctctatgtctctgtagatatcggtcacgttgtgggtggagacaagtttgattcgttgcacgtgaagtcggtaaccagtacgaatagaatcaattatagattttttagtgtaggcatttgtggattttttaaaaatgttatttttacctatttgctatttttaagatacttaaaaatgtatttatttacgattagtttttacaataatatatattttatactaaatattatatttcaaaaataaatgaaaccgattaaacataaatataacgaataaaatacatattaaatcatatttttatatttttaaaagaagcaaaattcataaattcttttaaaaatcaaaatccactgatgccattaaaaatttgataaatccgtaattgattctttattaaggcaacataaaatttgatgtgcatgcaaatcaagtctaagatatcgtttgagctatcgttcaaaaaacttgaccaacaaaaaaattactaaaacttatttttattattataaaacaagctagcaaaacatttgagattaagttgtaatatctgcatcagaaaaaatggcatatccacacatgcatgtgaacatgtgagatttctctttgtcttctatttaattatacaacatgtaacataatttttccaaaatattatgtgaaacatagtataatctgatttcactgcgaaataaacgaagtgacttgcatatatcaccaccaaaatctttacaatattagttgtgacgaaaaagtaaacaaacattaaaagaaagtagtgtcgacatcatcattcatcatatatgtggataaaaatatctgaagagtcaggatctcgtgatcacgaactcaagaatatgatgcgtttacctcaaatctcaattaatcaaattttttttttccctaacacacaaaaactacattatgagattttttttcaaaaaacactattatgggaatttgcttaattgttttcttttggactaaatgtactagacgctgactgatcagtagaaagctgttaactaccttagccatgtggcgcttattaaactacaacagctagcagtgaaacctaataagaacaaaacgtgttcgattttggtttggcgatactttgtctcattataaaattgcatgttttataaataaagatcaaataaaatatggtgattatatatatatatatatatatatatatattgctgaaacaaatccgtgcataatatatcgcaagtcttaataaacttaaaaaaaaaaaaattgtttatagaataacaaataactaacactaggattgtttttgttttttttaccgtcatagttttatcatactttttccttttgcaaagtttcaataatattaaattgtaaatggttcaaaccaaaaaagtgtaaaaacaaagaagcaagcatgtgaatgtgaattgttgggaaaaaaaaaggagatttatatactcatgtttcaaactcccattaccttgcaccaagatgatataaaagagcactatacaagatttctatcttacaaacatgggcttccgaaatttaatgatattaggaggcagtaatatttttctatatagatctaaagatgctataagtaaagtttctctattttagaattcaccatcttatgtgttgcatgcatgatgcattgcatatagttaaatccattaacgcgtcatagacaataatagatcattggccctcaagttcttctcttcagcagtaaagttcgacttcactttcttacaagaggttagtatatggaccagtggaccaaacaaagaaaacatttgattaattaccaaaaacaaatatctcaatattcttttgtcagcatgatcaaattggaagggaccacgtggcgcttgatgggaacgctccaacgccaaataaccaaaagatatccaaaggaagccaacaaggaagtatagtggaactcgcactcaatggtttcgactcggacacacacaatatctgattttacttttcttttttttttaattgcaagtttgccactataaaatcagtccatacccttagttaacaacccacattcactctcatttccatcaaaattataacttcattttacattttgattaatatcctaaaatgggtaatttcttgtttcttgcaatggtcacttacatatgtctatctttaaaacacacacaaaattatatacgtgttactgatctgttatcatctctgttttaatcttataatttcagttagattcatcgaagaaaatattactaaaatgttggagacaaaggccatctcaaactcggaggttttatatgtcggaggagacgacggagacacgtcaccaacgacgaaagttcttcatgattttcagatcaacagcggaggaggactgataagatcatgggttgattctatgagagcttgttctcctactcgccctaaatccttcaatagccaatcttgttggattgtaatgtcttcttgcttcctctgttttgtttgttttaatcttttatttcaaaaaattattaaacgagagaattacaaattttgcagaaggaacatccatctgctttgaacatgttcgaagaaatacttcataaatctgaaggaaaacaaatagttatgtttcttgattatgatggtactctctctcccattgttgatgatcctgatcgagctttcatgtccaagaaggtagtttttttttcaaaattttgaacatatataagataaatcttatagatgttctaggttagcttggtagataatcatgttgtgttctttttttttttttttggaattttaccatattgtgagagttaattaagtaaatggttatgtttttttttttcatttgtaaaatacacttagttgcctacttaagattttatctttaataaggtgttatttatatattgttatatatctaaatcatctacatatataaacataaatgttgattgtcaatttgtgcagttttgtttttgttttaattgaatatttagtgcagttaacctttgctaaatattctttgtgattgaattattttttcagatgcgaaatactgtgaggaaacttgcaaagtgttttccaacagccatagttagtgggagatgcagagagaaggtagcagtagggtaccatacatttttaaatttcattttaattatttaataaaagtaaaatttattttaattattattttatttgattatgtttcaggtttctagttttgtgaaattaactgagttatactacgctggaagtcatggcatggacatcaaaggaccagagcaaggatctaaatacaagaaagtatgaatacataaaaattatttttgccaagaaaaaacataaactgtgtattatgaaacataaatatttttctttttacctccatttttctcatttttaagataaaattcaggaaaatcagtctcttctttgtcaacccgcaactgaattcctcccggtgataaacgaggtcacattctactccaatcaatcatgatgtcttcttttattaaatataaaattttattatgatagttttttttcacatagatataaatatagctatacttatttaatattttgtctttcattatgtttataggtttataaaaaactagtcgagaacactcaatcgattccaggagcgaaagttgagaacaacaaattttgtgcgtctgttcactttcgatgcgtagaagaaaatgtatatatggatcatttgcttatattagattgaccatacagtaataacatacgtaatttaaacataaccaagcaactaatatataaattttcagaaatggagtgacttggcccatcaagttcgatcagtcttgaagaattaccccaagctcatgcttacccaaggaagaaaagtaatttttttacagaaatactaataatttgaaatagtcaatatctcaactaagattttactttttcatcatgattatttactttttctggtctggtttaatttcaggtattggagattcgtccaatcattaagtgggataaaggcaaagcactcgagtttttgttagaatcactaggtaaatcttgattcattcccaattatcaatatattgatcataataaaattacatataatggtggcttacattacattacttttggttttggttttgattttaaaagttgaaatttctaattagttttcactaatcgaaattaacatttataccatgtgtaggatatgataattgtaccgatgtttttcctatatatattggagatgatcgtaccgacgaagacgcctttaaggtatacactgatacacatattctatattcataatgtctcgttaaattaacatatataaatagtatagattaatgattatataaatactgattaaagtgacattgtaacagatactgagagacaaaaaacaaggtcttggaattcttgtgtccaaatacgcaaaggagactaatgcttcttattctttgcaagagccagatgaggtaatcttttgtcactctatatacacaacacataatgttttagtgtactaaggtgaatttatgtttgtttttttgtcaaactggtgaatttttgtttttgatgtagatttcttataaaaaaaagtctcttattttctacgttttataggttatggtttttttagaacgtttggtggaatggaaacagtcaaggtgtggggcatgaagagtttacaagtacaggagaaacttgttctttttcttttttctttttactatgtagtattggtaaagattctaacgtataagagaacgagaataagtttattaatataacaagaagacaaatattgaggttcatgttccttttattaaactttggttttctgactagtcgtttgttgctatccatgcaatgttcaaattttaaattatcccatgtataaaaattccttgtatttttgaaataaaaacaaagatatacaataatgaggatttttgaaaaatatcacaaccaaaagagatgtattcaatctaagattttaagttatttactagattttaacccgcggtacactgcgggaacaatttattttttaaagttagtatacatacaagtttgtaaattgtatatatctataaaatatttttattttataattacaattgttattaagtaacgtcctgtcaaacccgtcccgtaaaaaaaccatttattttattaatgctgatcttatttatgatatgttcataaattattatctaaatattttgtaattttgtagtaattaaatgctatcaaatatctctgtggtttaatgatattaaatattttggaagttttattttagtaactaatcgtgtagttaatgtggagagatttaaggaagattgttaaatgtcacatatttaattcaaagatttttttctaattatcaaaaacaaacattaaaatccagtggcagccattgtaaataagtctcaactacaagatttatttcacaaaatggctgcaaaaatgtatatatagatgtaaaaatttataaatcatatgttattcaatcatagattttaaaaaatcaaacgaaattcagtgttatcgaactaataatttaaaaatctactttaaaatgtactcttattgaaaacaatttgtggatttgattcttattaattttgaaagattttaataaagatttaaaaatataccttaaaatgcgatgttactgcatacaaaaacttaataactttttctgcatatactatgattttaatttagaaaaaccaaatatatattacttaattaatataaagtgtgtgttcatcatcctatatccgctaaaatatttaaaaataaataatcacttaaaaatgaattgagaaataatgtatttttgtacaattgattaagggaattgggagagccaacattgactaattggcaaattcaaaatagttaagaaccaagggagtatcacgccagggcggctggtacacatatgcctcgtaggtcttgctatcaccatcgtctccattcactgacatcaataattaacaatgtaacttgagtgctgttgttctctttgttctgcttggccatggtgaacttgtcaataacatcaaatggaaggatccttaatgtattcaatgagaaaccaatcacctaagagcaaccttaatggtagactcttaattttatctcttaactattttatgaattgtattattgaaaaaattatagctaagagtttttgtaatggtttgaagttcttaaaccttcttttatctcttagctaaggactttttctaaactattcacatattattttgattatatattatacctaagatttatagtaagagacttgcaataaggatggtctaatgtctcttccgttctttatttttctatatttgtttatatatatagagagagaagattcaagtaaatcagacggttctaacaaaacttgatttgactcaattatctagtgccatagaaagcctaaaactatatgtaattttaaatgtattgactcagtaaatgaatgtatatgttgatctgtgagatgttccaaactacttggtaacatggggatgcatgtgacttagatgcccaaattatagggagcaaaaacattgatcaccaatcccttcacttgaataataattttctgtgacatgtctaaaaggtggactaaaaacaaaaatcttttggcaaactctaaatgtcttttgattggatagtcaacttttttagacaccaaaatttaaagtaacaaaaaaggaaattttcttttgtatcggaactttcgaatgtagtggtgtgaaggaaaagagagaaacacaaataagagtgaggcctaggcgtgcgttccaaccaaccgaccatgtggaattatatgataaaagaatgtttgtattttacatcaagattgcaaatgtttaaattttaaagcattaaatagagttggatactgcgctcatcccaaaatgtgtgaaattcaatattagctagttagtttagaatgatatagtctcttgcaaaacatcatacataaaatagtatttaatttgatttgtttggtacgctcacaaaaaaaaatagaataaatgaatatagtgtcttgcaaaacatcatacatcaaatagttctttgatatcctaactattattactggtttctatacaattttatatatccaacctttacccgaaatgaagaattcattttataataaactataaaatttgtctttttatattcttgctagaagataacaatattgttgtcataattaggactgtgaaaatggtccaaaggtgcccttaataaataattggacctatttgtttcactttctagtggaatatctttatacacaattattgtttctccactgtggtttcgcgaaaatgaccactcaaccttttcttggtagatggtaggggtatagaataaatgattctttatgtatattcgattttttaaaataatcaagtatatttaaaataactagcgcacaaaaaaaaaagaacattgcattttgaaatctgcggtgaaatataaaaatatttttgtataaactttcataatttgtattttcttattaatacattccacttattgaacaataagatggtgaggccagattctcgcaaagcatttccgtttattaacacattcgcctctaaacgggtagttgcattcgcagacaagtacctctatggactatggcgaattcgacgaagccaaagatcatatatttttatgagtcctttctccttcaaaacgtggccttaagttggtggtcctctactaagctcgcatctcactcctgattggatgcatatgcaaccccacctcgtcaatggcactatcaaaattctcagcttctatctcttatgtttgttgtgagcgatagtgtaatgactatattcaatttttaccgtacgaaacagtaaaccgtcagctctagtgatcgacaaaataacagatcgggtctcctcgcacctatattttaatatgacttgtcttcacgacctcattagatgttggctcgaaggaagaagtactgatcaagattgtttcttttcaacttccattcttctaaaagtctatttgtttcttttcaatcttcattcttttaaaagtctatcttttctttcaaacttttgaaattctctattaattaaaatataaatatctttgttgaagctaaattttacattccaacagaaaaagagaaagttaaactaatagaaatgtacagacggcacttattcccaaaatgtaagttacatttctataataaaactaacaacactgagaaatgagaatgatcttatcaaaaagagaatgataaaaaaaaaaagaaaaaaaaaagagggaatgatcccatcaagttttcggagtattgcttgtacacacttggtctaggaaaaatcttaggaggtgaaatgttacttttgcatttaggcccaattatatcttctgtttttaagaagttctgactagtctgtttatttgtaatctgggctaaactaaatttatttgtaaaagcaaaggtacatttaaaaaaaaaaaaagacgctcactctattgtgttcttcttgttcacgttttcttttgtcgctcaacaatatagagtaaaaacaaagacattagggaaaaaaaatgaacaattgaacattacatagaaagtatgaattaattaagcacattgttaactctaacgacacaatcatgttatatataaaatatatatagagcgagtgtcagttcttgaactcactctcacaattctccgacacaatctcaaccttcttcgcatctaatagtcccttaaccttaacatcacaagtcaccaccacttccttgttccgtttgaccggccctgcttcatactcagccttcagctccatattcagcatcagaacaaccggttgcttcgatccacgaggttgtacaactgcgttcttggtcgacccattaagcttcacattgaccttgtcggatccagatgcggcctgggacaaccccggaaatttcccgctccccaggctcttattcttgtacgttaaggaaacgaccccgttcttttccatcatgtagcgtactcccatgttagacgttggattctcggctcttaatgtgacctcaaaattactaggatttacggtcaatctctcgaccgcgaaaacaggaagagtggggttgaaagcgaaatggaggatgagaatgattgcaccgagtaagaatccgaaaatgaccaagataatgaagaaccacaaaagacgtttagaacaccctttctttttgtttttctccgggttcttgctgcgtttctcgacgtattttgcatgttccggaggaggggtccaatagacttgatctctcgggacttggacaacgtacgtctctaactcagggattgaatccggaggaggaagaggcggagaagatgtcgttgggagtggagacagattaagagaatgattacgccaatggtgtgaaccgtgcgatggaggatctaaagatggcaatgcggggaggctagaggttggacggtgccaaacggacggaggatcatcgggtttgtcatcgtcagagtcaggggcggtggcggaaggaggacgccgtggcccctccatcggagaaaggtgggagttacgagatgtgtggtggagattggtctacagagaagacgaaagagagagaattaagagaggatgcgaaaattagggtttgcatgggaaaagtaagtggttgttgttgcatgactcaaacttttggttggttttgagaagattttgctatttagagttagccagctcaccttaaatttccctttttctgttatttagaaaactatattacagaactcatataatatagtattatggcatttgatgatgatcaacgaagttgttactttttgtttacaagatatcgattttctaacataaattatatatgcatataagacatacatgagtaaaatcttaaaaaggttagcacatattggtaatgtttatcatgaacgagtcttattttattttgtacgtttcgaactaaaaccatttttgggtggtatttctggaccaaattttcattaaagtgttttttatttcaattctcttgcaacttctgtttctttagaaagcgaaaaatgcatatatacgaatatacgttgggattgacatgaacggaatgtatgtatttacacacattaatccgcagcaaccggccattcaaaattatgtttgtgggccttgttgctgcttcgctgacaatactatccaaaatttatttcatttttctttctttgaaaaacacacaatcacttaattttcatttataaatcaaacatatgtacatgaaaatatcaaggaaattaaaggaaatcttaccttcatatggtcgaaagttttctttcaaaaagcaaaaacaaaaattaatgtttctctaattcttccccggccccaatccacgtgaaacatgttatgttgcgagcattacactggaaactgttacattacattctaattggcgaaaaatgaagtgcatttgtattgtatctcacgaagatttgcgtttgtgacaaaaaaaaatatgcaatttttttcgaaatctgacaacccatgccgacctgtccgccgagttaacgacgtgcttataggatccttaagtatttttattcttatttcttactcattccaacggaccaaaaacgaccacgtcatcttcatacgcaactcccaaaacagacgataattaaatcattgaaatctaaactctcatatactttagcattttcaacatttctattaatatttccatagactagatctctctttcttatacatccatatcaccgatgatgcctcgccgtgacgtcctcttcctctcactcctcctcgtcatcgccaccgtctccgctgtcgcattagccgtaagttttccaaatctgacttgcttcctctcatatatgattttgtctagaactagacacacacattaaccagatttgaatatgtatataatgacacaacatcaatgacattagtttaaactattagactacaaacttctgtttcttcccatttaaaaaaatgactttcttgatttcacaggacgatgaagcagattgtgtctacacattcttccttagaaccggatcaaccttcaaagccggtacagattcgatcataagcgctagagtctacgacaaatacggagactacatcgggatccgaaacctagaagcatggggtggtttaatgggaccaggttacaactactacgagaggggtaatctcgacattttcagtgggaaagcaccatgtcttccgagcccagtctgttcattaaatctgacctctgacggctccggtgaccaccacggttggtatgttaactacgtggaagtcacgacagccggagttcatgcaaagtgctcgtaccaaagctttgatgttgagcaatggcttgcgtccgatacatcgccgtatgagctcagtgctgttcggaataactgtccagtttcgcttagggaaagtgtcggtcgggtcgggtctgagatccggaagactctctcttggatcgtgtgagagtagtgaatgaaatgtcaaatgtgtatgtgtgtgtgtaacttggagagttgttctttgttgtcttgtgaacgtgtgatggcaataatgaaaatgattcgatcgaataaaagttccgttctttgttgtttgtgagatttttatcaaacattattaagtttttcgtgtgatgaaattaaaagataattactgatcatattaaaaagaaaaaaagataattactggttgatatagtttctttgtttcgttttattttcacaaataaacgttcaaagctacaaccttatgattaatcaaaactttgccaaatagtataaaagatgggcccttttcacatttttcgatgtaattttaaacatttaatacagagtggatcttcacaattttaatcatttttgtgcatgttcaaaaagtcaacaagaaacttacaattttgtaagaaacatcaacgacattaattggtattggcctaaacctcctaattaagtgacatttggttgaaacggaacatttctttgggtcatactaataactgaaaaccattatcaaatgaatgactttaaaattcctcctaaggcaccatataaatctcactatgctcctaatcgtcttttaaatctataaaagaaggtgtgagcaataagttcctcaatgaaaattgaaaaagatcatccctgcacacataatctatagaaccacaaagcaatatacaagctagacataaaataaatagacaatatgcctttaaaagataattactgattgtataatatttatttacaaagacttcgttaaggtcaaaatatttatgtctaatctccatccccctagaacatgtttttttctttcttaataatagtaactgtctaaaaagaaagaatttatgattctcataaaaattagaagaaacagattaaaatggttttattcaatcatattaattgacagaaaattaaatgtcatataaactacaatgaagaaaatgataaagtagtgaacctagtgataatcctttaaactaacgatcacatgattcgatgcaacaaagtaataacagacttatttgaattgccgcgtaagactttgaagatattgctttcaaagacgagaaaacattgtttcatcataaaaatcttcaaatacatcgaaacagttaatgatcgcatgttcatctcatttctcatacctctttggacttaactggtacgtaaaaagatgataggctaataatttcgttgagacaaaaactaatttaaggttaaagcattaactatataattgtctatttttgtgttaacgatcacatgcacacattcagtgcaattaagaaaaaagtttgatccaccaagtatatatgaatgtgttcgtttgtctacttaactctcgcactaaaaacaatcaaaaagaagaaatcaaacaaaatgactaagcatatcttaattattcttatgtttactcttctcattctagagctaaaagctcatggaacaaatacaatgagacaaagctaaaaagtgatgagggtctggaaaagttgtacaagaggtggatgggccactatcttgtgcccatccaccaaacagaaagtagtttcgatgtatttaaaaaaaatgcagaatatattgtcaaaaccaacaaggagagaaaaccgtacaagctcaagctcaacaagtttgcaaacttgaccgacgtcgagtttgtcaacgctcacacatgttttgatatgagtgatcacaagaaaatactcgactccaaaccgttcttctacgagaatatgactcaagcaccagattccttggattggagagagaaaggagccgtcaccaatgtcaaagatcaaggaccaacgtgtagtaagaagtcctaagaaacgttttaataatgatattatttaaaaatatcaagtaaagtaagactatctttaaatgttctaaagtaaattattaaaaagtttattgcagtatataaaatattcaaattataactcgttactcagtcggagtttttgttaaatttatttttgtttaaaacaaatatattactcaagtctgaatttttgacccattacaagttttctatcatagattgaacaatttcgattcgtttttcaaaattcaaataatgacatatgcagaaaaaaatctagcttttctttatatgaagatttatttgtttcacaaaaatagaatcatgtaaagatgaaaagaaaaatatatgattaataataaattaatatgctaagttagatatcaaaatcttatatgtttattttgattggtcattttcttaattaataatgtattttcctttttagaatttaaataaattaattaaattaatatttaccttatttatccttagtattttctttccacagatgccattatttgaactttagtacaacaaaatcaccaaaataaaaaaaaaaactaagaaattttgatgcacatataaataagtattttgacttatattcaaattgtgtggaaacaatgataatgatatccttcctccgataaaactaatcttttttgtatgtgtgggaagaagaatagagaaaaactataaataaggttagagttaatgccttataaagtgagaattagggtttagttttattttcgttagtttggatttaggaagagacttagtgggctttacaattaattcagttttgaattattaatgatttattttatttgttattttaaatagatgacatgtcaacttttaattggttattagagaagaggtgaatgtaagaattgttcatattttattatcatagatggtcttttattctcacttattaaacataacgaatcctcaaatgcctcaatgcaaagagtatttaatagtacaaataccctttaatacaaaacgaatgtaaggcatgcttgggaaaattattggccaacacatatcagaaactatactaacggtttcacaacattctttcttgatcccatggacatgtccatgtaaaattccttttatgctttcgagacatcctcttgatgtgcttttaaacgccttaaaacacccctccggatccgttggttgagcactcgaaggagaccaagtcattgcaaaaacaaaaaccataagaaaaattataatcttcatcgtcttagattccattttttctataattaaattaaaaaacccaaaaaattgtttagttttttttttgtaatatgttaatgatggtggagctttttatactttgttttggtagaatgactagagatatgagtttattcaaattggtagattttcgtttgctcatttcacctagcagatatgataatagagttccatatatcttggtatatatgccattcaaattcatgatcatttcctttataaaagatagccttttcaacaatgtcacttaattttgtgtacgtggacatataatacactcactacaaaatacatttacgtatcatatatatattaccaaagtaattaagcatttcgccaactagagagtgccacctgaacgtttttgtaaattttgtgccaaataaattagagaattactaatgatgactagatttatttatatataatcctagatatacaatatcacctcatcaactatttttcataaaatgttaataattaatcaatttttcagaacttcaaaacaagaaaaacattttaatttgaagatgatcaacataagaattgttaaatttaagtttagactgcaaaaaaatttacatttaaatcttatttgttccatgcacatcttttagttatatacgtaatgagaacttaaaactagttgttatgttacaaaaaaatactctttgatatttaagtttaatgtttcttcaggtgtaattttctatattgacgacgtgttggatctatacaaacaaaacccatctcgaattacaactaaacaaggaggatccaccatagatgttagatgtcagtcacggaagaagaaaattagtcggcaaacgtggatcaaacctgctggctaattaaggaaagcaaaccatgatcttcatcaaagaaaatcttttatatatatatatatatatatataattgttgctttattcaatcacttaggcaaaaaataacaaaaattcacatataaatggtcggaatagagcagccaggcaaacaaacaagatggcgctactggatacgtttcgctttacgcaagaatcgataactcaactctcatctccaatccaaaggatgtgtacgcagaggtcaagttcttcgtctacaacagaatctacgacaaatactatacctaccaaggtatgtaatgtaacctattgccccccacccggttagaaaagtgttgtttcagtgctagcagattttcatttcgaggctgtcaaaaaaaaaaagatcttcatttccagtttattgctatgtttggacaataatgatatgctatgtcacatttactattaaccaaacgttctgatcaatcagaaaaaataaagtatcatgcatggtaactatcttttgggtccagtacttaactgaacatctattataaatgaatgttgttgtacaaactgaggcaaggaggtttcatttattcaaacctgaatacggagtgccgtaatttcaacccacatcggtgttctcaacgctgacaaccggatacattttcgatggagaacagtgtgtgtttggaattgacatcttcgttgctcaaaccttgaatgaatgggaagttttctcctttgaagaaaacatcaaagatcccatttacacatggaaactcaacagattttcaactctctatagtgactcttacacatccgcccttttttcttctggaggaagtagctggtgaatctctctcttctctccataacatatagatatatacacaaacactacggtatctttacgtcaatgtgttaataagtaatgttaatgatatagggtattgaaggtatatccaaatggagatggttttgtaaagggcaattcatcgtcagtctatttgttgagcgagtctaatgaaaaggcttatgttcgagccaagctaagagttcttgaccaaatccgatccaaccacgtggagaagctaggtcagtgtgctctccctatttatatttcctttaattttgttaacaactaaaacttttgattgattcatatatttttttgatggacagtggatggatggcctaatgcaacagctaataataatggatggggtttcgagaagtttgtaccatttgcagatcttaaaaatgcatctaaaggtttagtggtggaagatgcgctcaaggttgaagtcgagttcattggcttctctaaaacacagactccaccttagatgttttttattaggatatggttcaatataatgtcctaaataataattgaggagtttctagctctttcctgttttcagctttgggtttcattttgctagttccattcataatgtgaccacatttgtttctgtaagagctttggagttttaataaagagttttgtcctaccgggaatgatcctctataataaggttctatcgaaataaatgggtagaattatcatcattttgaagaggcatgttagggataatatcccaaaaccaaagtactcttgcattttcagtgatatataagagacatgcatataacaataaactcattgctgatagattttgagttgaaaatctatagtttctcatttggtatcaatagtaaccccaaatatgtataatgaaaaagagggatttgattcgaaatcaagtgtacactgaaccttacgttaccatgtaaacatgcttaatcaaatgacacgtaatatatataatcaaaattaacgcaatgacataattaaatcattttaaaacaatggcatgtccatttaaatttctcgagaaaggaaacatagtaactagaccaaacaacctcgtttcatgaatttggggctttagagtttgcgatttatccgccatatcattcccaaacatcaatgctttcgtcgcatgtgtatatctcctctttgtcaaagaaatcgacttccgtccatagggtttcatgtatttcattcataccttattaattgtgtttgattttatcagtgtgtttgtaatggtgatttcgtttctctttgtgtatgtaatgttgatcttgagatagctttattgtagaaatgagtttaattgaaaggggcattccgaaaacaaattgatgtgatgacattagttgatgaaattttcactagagccaaacaatctttaaccgccttcattcgttgtacttttattatatgaaaaaaaaaacacagattttaaattcattcaacaaaaatatgtaagataattatatgtagaatacatttgacaagtattaaaatagataaatattgtcattcttaataatataaaaatgaagcaaatactcttcaaattggcacttcaatgcaatgagtatttgacagtgcaaatacccttcaatagaaagcgaatgtaaggcatgctcgggaagatgattggccaacataaatcagaaattgtacttacggtttcgcaacattctttcttgatcccatggacatgtccgtggaaaatcctctttatgctctcgagacattcatgtggtgggtgtttaatcgtctgccaacatgcgttaggatctatcggttgagcactagaacatgaccaagttatcaaaaaagcaagaaccatgagcagaaaagttgtcttcactgtcttagatgcgatttgctttatcaaattataaaccaattaaatgaatttagtttgtgacacttatgttgttgatgatgatgctaattatgtcagctttttatggttgttcattaccatatgttttgaatagaatggttagatttttattttattttgttaaatagaatttttggattttgatttacgtaaattagtagttcttcttcttctgcatttcacctagtcagaaaaataagcataattcagtaacatattaattgctacccaatttgaagatcatatagaatataactatataagtgattatgtgtattaaggcatgcatgtttttaattagatatagatatgatcctatatctaggataacatatcttttaatttaattgttgtagatttttttttttgctatgatatattcatattttactcttcttttcaaagtataactctttgtgtatacatttccttatatatttcttcaatcaacatgcacgacatcatttcttcatggaaaatcatcttcaatcaaataattttgcaagatattttatgttgaacttctgatgaataaacatttcacgtaaagaggacattacaatgtccgaactgaggaatgggtaaaaatgaattatattaatagaaaaacacacttaaagaataacttttagctaccgtggtatttacagagatgtcatgctgacgtgttacaaccagacaaattctcaaccaacttaaatcattgtccatcctttattagattattcacaaaattaactattagtattatatacaaatatctttgtttttaatatatagacatgaaaattatatgttaacaaagatattaatatataaactacctttattttttctaatcagatattaccaatacttttgtaaataaaaatatttcaaaatatataaaacaattaaaattaattaaattataaatattcagaagattctaaaaatataatattaattaaatttaatcagaagattccaaaattttccgttaaaattatgaacataagaactaatttatttatagaacttatatacatgtttaaatcaatcaatgtatgaataataataattttaatacaaaaaattgctggttcaaattattttaaataaaatttacattacataataaacaaacaaatttcaaatttcaaataataacatagtaacttttgtaatttactacaatatatttatttaataatttatttcacatataatgcgggttaactatctaataatagaaaccaaaaatttgggcctaccagaaaaaaaaaagaaaccaaaaatttgaacaaatattattagatatatagcatatattttggaaagttctatacttgttttttcaatgaaaaaatgaagaagaatagtgacacaattctccaaaacggttaccaattaaaatttcagtgacttttgttaagtcgtccattgtaggccgcttattgggccataaaagcgataatagtcagcaaaatccagtagccgtatttactaaactcgatatatgatgaagaatgaagatgaacctgtatccaaacactccatattttttgaatacagataaccatgcagccaaacgttgcttaacctctgcgttcgttatcggcgatttcgaaattcgaatcatcatcatcttcctcgatagtcccgcgctcagtcgaaattcaaaactctctcttccatgaacgatcacattctcatctctgacggtgaggatcagactactccacttccatcactgtcgaaacgggctcgaaaatatccaatctctgcgatactgatatcggattcagatccgacaccgcagaagcaaccgccggaatcttcttttactcctattttcgtccctgagacacctctttccgatgatttctctgtcgtcaagtgttcctttggttctagagctttagcttctaaccgcgaagacaaattctccggttagttaatgttcgtcctcggaattttctcgattctcagtgtttaggtttagctttagcattttctacaggaaattgataccggaaagcttgttctactagcgaaaattttgtgatttctggggatcttaggcagaatcatcaggctaaacaatatctctatgtttcttttggaatctcactaggcaaacggataatatctctggattcggagtttgaagatagtcctcgacctgaaacttcgaagaagaatgaatccgtgcttgctggtttaagggagcctcggtttggattggaagccgaaaccagtgaggcatactataagaatactagaatacctgagacaaatttaggtatgcttaccccaaaaccaaattattgtgcatatatatcagagtatacatgatgaacttcatttgtagggtccacatacaaatgctgattgctgtattttttcagacgatgatactagttggatgcatgaagtcagttttcgctcttcgccaactaatgatactattgaggtacttatctgcaaggaactagtaccatattgttcatcattggtacaggattaagggattgttgactttattcgttgtatgattttgcaaagctgtctttttgagaatgtgacaattctggattcccataacgtctcatttgtttgtattttaagagttcacgttgtgctgatgtttttttcttttattttgtttctctcttactcttatttctaaatggtatcaggttgtttctgaccaagaaaaagaggatataagcgttgagaaaattggtcgaaaaaagaagatcagaactacaactcttccagttccaggtgaggcattgccaaaaaagcggcagtcgaaggaagacaaaacaagtgcaatggaggaaaagaagttaagaaaagaggtaagtgttctttacatgacttttctatttttttgtttctttatcaattgttgactggcttccataatccagcaagagagattagagaaagcagcctcaaaagcagaagaggctgagcgtaaaagattagagaaggagaagaaaaaatgggaaaagggaaagttagcccttaaatctattgttgccgagattgatactaaagtgcttgaaggatccattggaggtgaggaatttctctattctttgtattacttttcaatagatcctatagatgttttttctttgactctcttttttttgtttcatatgaatggtttgtcactttaagtatagacactgagtgcctctggtataatgtgaacataggacttctgctttcaaggttctctgagaaaggcattacaatccacgtaggccctaatccaattgagagatccattgtgtggacgatgacaattccagaggatattgctccggtacaattaattctcaatcacttttgtttttttgtcatgtatgaaaattagttcttagaatccagaacttgcaacaagaactagctccctaatctggtccgtattcttgtttaatctcaggataagcatgttacttcaatatgtgtttcaaaatttctttgacgtttggatcatactcttctgtgttgcaagtttcatatcttcgtaattttagtggaggtagtcaaagctattatttcatctttggatagtctttgaatggcaggagttttgaaaaactattttgaaagtcttcaatatttcttagaaagaaatcgatcgaagattacttcattacacctgacattgaattgcgttacatgttatgaaatataacaaaggaaatgaaacccttttgctatgggttaaagggtctttgaagtcagtacttgactaaaactatatgaaacatctgtatccagtatcttattttactctttattaacatcctcttttctctggtgcagcttttcccccaagggcccaagattccttatttgctacttgtgtatgacgctgaagaattttgtaatcttgttgctaatggaaaatttctagaaatcatctcaagagttcaggacagatacccatcttatacggtgtgctgcctcacgaataagttaatgtcctacgtaaagaaaaggtgtgtttgataaagtgatttggtgttatattaatgtttccgtcatcaagctgaataaaaccaatcttctagggaaaaggaagagtacaaaaatccgggaaattggagacggcctcctatcgatgaggtaatacattacctagtgataatgtatgtagaggaaagcctatttgttgctcctatgtttgtgtttttaaacatacttttggggcatttgatatgtattacacaggtacttgcaaaattaactactcactatgttaaagtacattccagacactgtgtagacgaggctgaggtggctgaacatattgttggcctaacaagcagtctggcctcttgccaattcaggtaccaaaaatctactattttgatttctcttacagaagactttatctcgattgatgttggatggaatttttgatttctttcctcaatgaatcccgttagaccaatcaaagcaataatattttgatgaaaacctgtgaagtctaaatcatatacatcttcacgcgtttaacaacttaacgaaataaagatctaacattgggagtcatcacaaaaatgggcagtaaggcttgtcttgaaataagatctgtaaagcctcttatagtctttaaatcatacaaggctgactaccgaatatctgggaggtcaacattacgtagagctgtagttgatagatgaacgtgtggctaataatgtatttctctgcatgattttgaagtgaaactaatcatggctctactatgtgatgcacaggaagaaattaactatgttatcagtaagcgctaatggtgcattagtctccaaggattcagttgacaagcatttgattaaaaagagtccatggtaaagtaaagtagaacattttgaaaataggttgtgttttagtcattttgaatctgttcaataagtaaaattattacggtctataggttaaaagcgttagtagcaataccaaaggtacagccacgatacgctttagcagtgtggaagaaatatccctccatgaagtctcttcttaaggtttatatggatcgtaacaaatcggtaagtaaaaacatgtgagacatacttggatttgagtttcttcttagtttgttgtttctaaagcaattgtgtagtgttggttaaacaaatgaagatgttcttttgcgtctttttttttccaggttcatgagaaggagtttctactaaaagacttgaaagtagaaggtttagtgggaggagacataaggttaggtgagatttgttcaaagcggatatacagagttctcatgtctcacgatggagccattaagactgatgacgtcgaaaatggtgctgctttcttcaccgattctccaggtgttaattagagtcaaagagcctaagatttcttaaacatataagataaaataaaatcatttcaaccacactgaaattttgttttctctttttagatcagtttccccgattcaattccgaacaatttgctctaagtaatagttattctattctagaaccaaaacgttaaaagtaaaattccttaccgagatagccagacgtcattggagactgttgccgacgacatttacttcggtgatgaacatgacgaacacggcaagaggaattcggtttttctcctgcggcaactgattcggcaagacatgctgaccaagaggacttaggctgtttttgttaacgttgtttttacttcttagtacaaaaaaagcgaaaagtaaaaaagttctcacatcgttaaagtttaaactttataggcacaccaaaagatgaacaaatatgaagatacataacatacaaatgaggacaacaaaatgttacaaatgaattgaatcagtaaacacacagttaagaaaaaaagaagataaaaaaaaaacatttgtaaactgtaatcattacattacaataccaactatatacagtagcattataaatcaaacgatttttaaaaaatttggcaaaaaaatgaagcagaagtttcgatttaagaaacctctcaaacaaaaacaaaaaatgaagtggtggtttacttgttagaccactggaattctatctcaaggtttctgggaccacttttgctttctggtaacaaactatattcacctgcgactgctcccagcatcaccaccctatcgatttggatcgttactttcccaaaggaactctgcagaaagaaagaggcgaaaagccacagtttcagttaaaccggcaaattttcaaactgtaaaatacgagtgaagtttgatgacatacctttcccattttgcttttgttcttgcatgaaatgtggagtttttgacctttgggagggctctcaaatgaccatgagaagctctcgtcccactctggattaggacctgtcgatatcacctgagaaaatcgaaagatacggttgatatctaaaggaattactagtcacagtgaattgacgaaagggtgataagtcttttcctaccttggtctgtctaggaggattgttgccgagtgttatcttgcagaacacactcgggttaccaacggattgcttcatgttgttaccacgtttgatagtgactaccagagtacctggcaaacactgcaagaggaattcagctttctcctggaaccgtggtggacctgattggattaggtactgaagtagggggatggcgtctgcagcagcaactgattgggccctggaaacttcggcaggacaggctgaccaagcttgtctgagaagaaacaatgcatccaaggcagcttcttgtgttgcttctgatcctgtcttgagggatgtaactagatgtggtatacttagtgttgcaggctctgtagctcttagacgcgggaagttgttaaacaaagagtttaaggcttttaggtattcatcattcacggttccagtggcccataagtctttctcaatggcagctgcaaattaaaaggaagcaacatctgagatataagatatataataagaatgagcagatcgtattgatacaaaaggtacagagattttctcaccagttattgctctgacggtttcgctagatgcgtactcttgaacggtgtgattagagaagagtagttttacgaacattgcagcctgaacagacgtttcaggatcactggaactgatcagatccaagacgacctgcacaccacctgcctcggcaactgctcttttgttagatcggctatacatgacgagattttgcagagcacatatagcaactactttcatttcttctgtgggttgttcttcaaggacattgactaaagcacggcaagcagaagctgcatcggtgcttctagcaagagcttcattctggaaaagatcaccaagggccaaagttgctagtaaccgcgcctgctgagcttgagtttgtggatccaagaggtactgagacaatggcaagattgcagtcttggtggcttttgaatctctaatcttcacgttgttgagcagtacctcgagcagtctcgctgctgtgtcctcacactgatgagaccttaaaagatcaagcagagcttctatggcaccactttcagccatggactctgcactggttccatcatcgctttccaacactagaagagcgttaagtgcaccaaccacggtgttttcagatgcagaacgaagcagtcttacaagaacagcaacaggaacttccaggtaaaattcggagctaaattgcaagatgataaccaaaattgatgctgcagactcccataacacattggagagcgatggatcagcttgcagtatcacctttgacagctcactcacaccaccttctttagctatttcatttggccatgttagagcaatgctgacgagagctttcacagctctctgctgtaataggtgtatgccggatcccagcacatggattagaggaccaatcgcaagttgcgttaatggatctttctgcagatgctcctcgtagagaagatgagatagaagctcagctgccaactgctggactgctggggatggagattccagtagcggaattaaaggctcaattacttggtgcggtgtaagtgtataatcagcgcggcattgtggatgttctaagatatttaccagaacttgcagagcactgtgctgtccatcagctccaaactccaacctcgtcagcaaatggaaaagtggctccaccactttcgcagcagattgtcccttggcaatagtagcattatttgtgaggattcgaagcagttctgaaaacgcagcacatagaaaatctggagcttcgtggagaatatcaagtacgcagtcgataactccagctttcaccatttccagtttacaagcaggcctgtccttacccaactttactagagccctggatatagcctcatgaagcacatagtttttaccatagagaaggccaacaagaggtaccacagcgccatgagctgcaactagttcagccagttgttcatcgtcgacaagctt

SEQ ID NO: 265 - DNA, 106949 bp, Arabidopsis thaliana
gaattcgcaacactttctttagtaaagaaaccttctgtctcgtctcgagggatcatatacccaattttcttctcttcaatgactctcgcattcaatccttggtcatacacaaaaaccagcattgccatcggtttagcaaaccggatagcttcaattatcgttccccaaccgggatgagtcagaaccaaaccgatcgagtcatggctcaatgtacgcaattgctcaacccaacctctccacaccatccctctatccgctgtacgctcttcgaatccttccggaagctcgaccggttcggtatcccacggaccacgacgagtctttaacacccaaaagaaaggtaaaccagaaagctctaaaccgagagcgatctcatttagctccgtttgactcggtttagcttctgaaccaaaagctacgtagacaatggacttacttttccgtgagtccaaccattttttaacagacagccacgtgtcggtatcttcaaacttttcgtccggttttggaggcaaaactccgaccggtataaccggtttccggtgaagttcttgtgtaagtcctaaccactccgcttcatactcgtaacagctccgtacgaagatgacgtcacagccgtcaattacgccgccgacacggtggatgtcgggaacattcccttcggtggtttccgccataaatcctttgaaaatgaacctgcattcaaataacttgaaagctaccgaagtttcaaacggaacccacttaggcggcttcataaaatccgccggcgaagtacggtactcttcgaaccccggcggtttaagaataccgagcgtcgcgccgttgaaagcgctaaagaatccggttttgattccgagacgacgagagattggaggaagccaaaaccccgcgaaatcttgaagaacccaatcgggtttcgaagattcaagaaactccgtcaccggaacttttaacccgtcgtaagcgatttttaagtaaggtatgagttcgaaagggacgtctgtggtagcttcaccgtcttccgggagtttgttgtcgccgacgggaagtgatagcttgacgaagttaatgacggaggagagattttccggtaaccgtgggaggagacggtcgatgttacgtggagtggaaatgaaagagactttgtgacccttttgagctatgagtttagagagctccaagtatggaaccatgtgaccaaaggctaaccatggaaacattaccacgtggagtttggttccatctccatcgttgtctttgaagtttgtcattttcactttgatgatatcgagttatcgactcttgactatcttcatttataggcaagcatatagatatatatacgaacgggtcagagtgggttacgttcgataaaataaaggtattaaaacattacagcattacaagtatagtgttattttatttgattgtgaaaacagatgttgtaggtacgattaacagctgagattaagtttaggtcggtaagatgtgtggtagtattaccgtacatatggacacccaatagtatcagattactataagtgatctgtttccataatcaccacatatagttagactacttttgagatctgattctttccacaaaaagttcatgcatacgaatttttaaattcgaatatctattttgctaggacaaagaggttgcgttattatagtagtatcgtgcatagtcattgatagtttagcatttcattggaagacgtatcattgttttcttcggtaggcgtaaaattttattcaaacaaaatgatcaaggttttcctacaacgaccccatataagattttgatttcgcttttgctttaaatttttgatttggttggcctatcaattcaacatgtttctaccgatatgttgatacaggaatcaaacaagtacaaagaatgggatctctggagaagtaagaagaatcttcaagttgttcgagccggaagctaagtgaggtagacgcgttgagggcaacgatctcagaacggggaagagtgggagcggcgatcctgaggtcagggcgatccttcctcgagtcttcagctcgtcgaattagggcgtcaacaatcgtttcttcgcttgtggttgtattgtcgctgtattagtgccaaattcccgtcccatcaacgtttctttccattctttatttatagccgcttgtttagggcgtacgacgagggtaatccggccaattccctctgtttaatgcgatgatctgtcctttctccagaacattcattttcaatggattgggctttgtttgtaacgggctttgacttataagtcgaaatcgagctgtcaactctttttgggccagaattgagacttgtccaattcttccctcaacacgatagttctgacaaattcatcttagcgatgtctctcgtctcgtgatatatcgatttgtttgacttgtaatgtaatatttttttaaaaatctttttggtggtctttcttaacaatcggtgaattttatcataacctatagtttagagaagtcatttgggtatttgatatgacaatagacaaatcttttcgaggaattgatctccatgataacttcctcttcctaaagacatggtctgatgatggtgatgttatcgatgccccttgattggattatccatcttccatagaaaaagaaagcatagttacaaatcggtaatgattgatagggtattataaaagacatgttccaaaaccattttaaataaactatttgtatgtttgtataataagagtgttgcaaaactcctttgagaatttcatctataaaatgttagccaagtatataaaaaaaagacttaacagatttcatatgttgtctctaaaacttccatttaggaagaagtgttactaccatttttttttatcgaaattatggtcttttattttggtaataattatatttaaatggtttatgtatcatgtaacacatttctgatataatataattgaaattgaacacaaaataaaatagaataaaagttcaaattttgatgcataaaagtttttctttaatattaaaaaaattgaagggcttcgcttgtgattgcctgcctgattgggaagtctttttaactaatgggctcgctttgttagcccataatctgctttcatctgaacaggcaaaaagtatatacgtaagacggtaagagtcacagagagatcaaaatggaggtgcggggaatcgaaccccgtgcctctcgcatgcgaaacgagcgctctaccatatgagctacacccccaattggtaacaatactaattttatttattatatcgaaatacttaaaacagaaatttatattatctgaaaattatctgactaagcaaaacatgatccagtttttgatcatgtttactctatattaattactttacaaatttttgatccagttttctcaattttttctagactcgtatcgatatggcgaatcatgaaacgatatttgatcagctaaagaagcagattccagtagatgaggaagaacctctgattttgaatcgagactcaagcgttggtctcgtcatcgttgacgttgttaatggcttctgcacaattggctccggcaatatggtttggttcaatttctcgaaaaaaacaattgtgactttgcttgtttttgtttcttaatgccttccaagtatttgtgatattgcttaagtcaaacgttttgtaaacgaagtgaaaagaattgtgactttgtttgtttgtttttttgtttcttaatgtcttccaagtgtttgtgatattgcctaagtgaagctgtttgacttggcaggctccaacaaagcataatgaacagatatcgaagatggtggaggaaagtgcaaagcttgctagagagttctgtgatcggaaatggccggttttggcgtttattgactctcatcatccagatattccggagagaccttatcctcctcattgtattataggaactgaagaatcagaacttgttcctggtattggtgtagctttcttagtgtctttgtttgattctattactagagacagtgtcttgatttcttcttcttcttttgataataatgaatcagctctgaaatggcttgaaagtgaggattgtgccactcttagacgaaaggattgtattaatgggtttgtgggttcgatggagagtgatggttctaatgtttttgtggattgggttaaggaaaaacagatcaaagttgtaagtttttcttttgataaaatgctcagttttgatgttgaacaagtttactgcttttaaacaaatcttgaacatccctatgttttgggaatcttaagattgtcgttgtaggtatctgtacagacatatgtgtgtttgattttgtggctactgcactttctgcccgaaaccacggtgttctttctcctgtagaagatgtggtagtgtactcccgtggctgtgctacttttgaccttcctcttcatgttgcgaaagacatcaaaggcgctcaggctcatcctcaggtgaaaagtttgatgcttctgaaattagcatgtttagtttttgttgttgttgtcaattaacacttggaatcggttcatcttcttattcttctgttgtgtttctttgtatcaggagttgatgcaccatgtaggtctatatatggctaaaggaagaggagctcaggtagtctctaaaatttcttttgagacttgaaagactatatctcgtttataaacataacactcttgatatcaaatatttcagtaaattgttgagtttgcctctcttttctttcgtgtaaattgttcatgaagcttgttctctgaatttcaactcttgtgtaactgtttcagaatgacaaataatatgatgggtttctcatctgtctaaatgaaattttcaatctgattttacacagtttttaagaaataatggctcttagattcatagcatagttttataggattgttgcagaactagtgtgtctattttcatgaaagcttgttcactgataatcaagcataactgttgcagaatgacataatttatttctcatctgataatggctcttagtacagtcctgtagtatatatagtctcataaggttagtggagaattattgcttatttttgtaccattatgaaaatacaataaatcacaaactctatttcttgtaatggttctgaacatacaattttgatgaagaaaaagaaaatgtaaaaagcctgaagacattcctcttgtttcaccagttacaaactgtgaacaatctacaaaactcataaagcatataaccaacacacaaaaactattgtttcaatctcgcaaaccgaaagaaaagagaggttaacctcccagggaaaatacaggtaaaagaaagacacgaatgaatcaaatcctccatgaatctgataaattacagtatatgaaccagttaactctctggatagtatgtagtatataatatgcaaatgttacctatgtagaagtcttcatctttctatatagtgagggatgcatgcaggagaatatggatggctttgctctcttttgtttggagccaaagatgaatgaccttaagggcactcttgagcggctatcggaatgctggagatcaagatcagatttgttctttgaacccgaaagagcaaactcgtcgatcagctttcctagagtcttatcaacctcgagttgaagcgtggtaatgtgatctaacccggcctgtaactcgtctgccactttgttgttctcctgcttcatgttcaacacctcaccttggaatttagcagcttgatagctcgtgaatctgaaatcatcgtcttcagcacttgacttgagggcttttgttatctcatcctgtatgttacacaaggactcgaatctggatttcagttcctctttcaaggcagcacctttctccagccagagccccaggtctgtgtttatttcccttaagtgtacatacagtggtcgaacatctgatctcagggcatatttggctgtgctgcttccatcttgctttcttctctgctcgagctttgatatctcggcttgtagatcttcgattgaagtgtcgtagctctgtatctgtccaaatgctgtgctgaaccttaaccagaaatccaaattctcttctagaagctcatcaatattcagcctgaactgctcctcaaccagggacatgttctggttttctgcagccatgaatccgatggagtagtcgtcgtttgacaattggttttccatcaagtcattactgtctcctagacccttctgcaagaggctcattttctctcttagtagcttgatctcatcatcttttgtcgcattctctgtcttcatctttgtcttggtttcatccaaagttttcttcatatccttgaagttcctgagaatagttgtgtactctgtaagcaaatgcttttccctgttctccattcccttcatgaacatctctttccaatctggttcaccttctttctccttttgatcctcttgttgttcaccattgaaactgatatcagactccttctctgaaacattactcggcacagaatctatcttatcagattcaccttgcttctccaaaacagaatcaagaacagaatctgtctgatcagatgcagcttggttctctaaaacattatcaagaacagaatctgtcttatcagatgcatcttgcttctctaaatcagaatctactttttcagtagattccaacacagtgtctggatttgtacttgggatggtactatcttctgctattgtcgcattgcgggtctgctcgaattttacactcttcacaggtgcttctttcttctcctcacccgtttccttttgatgttcctttatctcttcactgatatctaaagtcctcttctcaccttccagatctttctgcggttctatactaatcgccaagttatcagactcgctctctggcttcacctcatgcaggttcccaccagagaggttatcaagattatgacaagcgtcatcaaaatgtgtctgcagattgctactcttgtccaaaacatttctgtccaaatcctgcaatgccttgagtttctcttccatttccttcagcttgttcctcagatcactcttgtcgtctgctaacaacgccttatctgtttcaagagtactgatctgcgtctgaagaccgttggtctcgtttcttagtctctgtatcaaagcagtctgcgaggaaaccgcactctccaagctaatcactttgttcacaagctcatcgactttctcagccatatctgtcccattgagcgatgaattcgcaccagactcaaaatgttctctaatcttctccttaacagattccaactctttcttcttcctagacatctctttgatctcatgatccaactctgctgttcttctaacttcatcaccatcgtctttcgcaaagacactttcatcacctagaaactggcttgccatagatcttagcttctctttagactctttaatcttcacatgctcttctctagcttcttcataagacttctcttgcttctcctgcaactccactagcttctcctgacaagactttatcgcagtctcggtcatcaatctccgagcttcctcgtcttcaatcgcaacactctcaccaaactcatcctgcaaaccacagatcctctcttgtttctccttaatacctttttcaaactcccaatacttagacaaacctatctcataagaactcttcacaaactccttctccgtctgcaacgccaaaatctctttctgcaacttatcaatctcccccatcgcctcaggcttactcaaacccgagctcttaacaacaacattcgtagaaccacccgtgtacttcatagatttcctcggctgaagcttcttcgtagccactctaaccgcactcttcaaatccttaacaggcagtttgggaacattagggacattagcaccagaaatattcgatcttttagcaaatttagacatatcaatatcatcatccatggcaaagtttggaacttgatcaggaaaaacagaggcgatcgtcgtgttagcattttgaagctctgtagaaatatgatcataacgttcagctaaagctctataagctctgtaagattcttcaacgaagctaatgagttctggtctcttcttataatacatctctgcacgcttcgcaaacgaatctccatcttcttgtaatagcttcaacacatattgaaccttctcttcaatatctacaaattcatatccaaaacaaaaaatagatcaaacctcaaagatctcaactttttagaaacaaacacctatataaagagacatggattcaaaaggagagaccttgaaggttttgttcgagccatttagattgtttggttcgaatatgactcgcccaccaccatgaatacgcattactcgcagctcgttgcagcatcgtcgtaaagttttcgttttttcaactctttttgatcgtattcattcaaattcccagaaagattgtaactttgatatgtgtgtgaaccaacaatctctctctgtagagtctagatcttaataagaaaagaaaaagaaagagaaaagtttcggtttttagagagacccacaaggaaacttaaaggtcttttttggttgtaaatcaaaatcagaattgaggaaagaacgtgcaacaattgaatctcttttttttttctttctttcttagagaagagcgatcatgggtgggagcaaacttcgctcttctttctctctctctaccttaatagtattttggtaaaaatattttaaagactattaaaaaaaaaattgttacaaaattttcaatatttgatttatatgtacgaatggtgtttacacgaatgttatagtgccagcgtcgtggtaggagaagtcggaaggattctcttccgatgattcttatgaatcatcaaacgttacagaacatgtcagaaatgtatgattttattaaattaaactagattttaacccgcggtataccgcggagacaattcattttttaaaattaatatatataaaattttgtaaattattttatagtttactattgttactaagtaacgtcctgccaaacccgtccttccaaacccgtccacaaaaaaaaactatttattttattaatattgatcttatttataatatgtttatgaatcattgtcaaaatattttagtcgttgcgggacgttgaacccacacatttttcgccaattggttaatatatatgttcattcttaaaatttcgaatcacaaaatatgacgaaattttttttgagatttttttaattttatatattatataataatgttaattagttttgatagattaaactttttataaattcaaatattaataatgttttatgaagtttaaatatataaataataatatttaaaaaattaatattttttgccttttaggtaatgatataataactctaaaagcaaaaatttagaagatttaaatctttaaataaatattttcatgtctaaataattaatgtgaagtttatgctaattttaagggattgatgtgaagtttgtttggattaaatttgattgataatgtgattgacaatttaaattaaaaatttaatgtaaaattaattattttggaaaaaaaatttaatgttaatggcattgagttgtaaataaatctaactctaagatttatttgctaaaatagctgcaaaaatgtatatatagattaatctgacaaagaattttagtggataaaggaatgtgaaaatgtcgttttgtttaataaaaaagttgtaaagatgttgaagcaagcaaagaatttaatcattaagtaattgaatcttaaagaacttttttcccctttgtgacggtttaaacataaaaccggacacgttttgatgaaccggtcaaaggtcggtgtgtaacgatccgaccagaaccttctttcttgtgcaaagtatctctaaaacgtcaaacctcattatatagaggcccatttactgaattttgagaaaatctgaaacttttttagattttggacgttgtgtaacgaatgatgaattagaagcaaagtttcaaaccatattcatatttcttgttgctaacataatgaatcgtatgaatatggtttgaaactttgcttctaatttattatcatagaactcagtctcatccaaccgcacagctccaactaaactacaaatgtgtttctcaaacaagacacattgcaagtgtcacacacacaagtaagatcatcaattcaccagaatcatcaccaatgaagacacttgaaatctctggtctgagaaaacttgtaaaactttgcaacaaattcaacaaaacaacaagatgaattcgaatcacacttttgttacactaaaatttctaatgagactgagtcctatgatgattattagttatttgaggcatcactaaaatatatttttgatccctaaccaagagtatatcgataatcaaaattctacaatattttatattctaactttccataacgagaaagtttatcggtgacaagcgttactaaccagaaatgcagtgaagagagatcatacatagtgaaaatcataaaaatgaaagcctcttccataggcagaaacttacacaaacatttgagaattcactacttagacattgtctcttgttactaccgagttaaaaagatttacattactctcctcactccatcaacttctttgaattgttccatctctaaccaccatacggtaagctgcacaacaccatacattaaatcaataacttattttttagagtgattttgtagatgattagatttgtgccagaattttcaaaaaacaaaccataaataagtggtgttttttatgacaggtaattttaacaaatagcatgatatcatgtaaaatatacaaaataacatgttatttgttagaattacaaatatacaacaaataaaccaaatttatttacgattctgtgtcatccatatcttgcaatgccaataaatatggacaacatacatgtatatggtcgtttaaagtatatatttttatattctttgtctcaatttaaaaacaaaaaaaaaatcatgtaaagctatcaactcaaaagaatgtaaaaagaaagggtgattaattggttacccgagcctaagggaagtgtcggagctctcggagtcaacaggcgctccggtagagtttccggcgttagtaatagactccgacgactgtccttcctcgtacacagcagcgttctccgattcagcaccaccgtgtgcatgcacattgttacatatctacacgtaaccaaaaaaaaatattccaaatttaacattaaactgataacaaacatacaaaattcaaaataatcaagactatatatatatccacgtacttgcatgccaagtcgctcgttctcttccgttagttgcgttccctgcaaaaatcaagacaaaacatatcattaagttctctagctaagtatttgcattttgtgtttttagtggcaccatgtgttttgaatttctctagagatcaactaactacgaatgagcaaatcttgacatgaagcctcgaccaaactatatatcaaacaagaattagatatatattcgtttatggttccctgtttcaaaaaacaaaatgaagatgaaaaagaaaaaacgcaccaaatccatgcatgcacactcgtagacctctaggaccctagagactaactagctacatggttacctttagttttaaagacatttttaaatcgcgctatatcacttggtttattcatttatctcacagtatgatcaaacatatgtgttgtagacaactggggattaaatttaggggtgtgtacgttaatggtagacaaaagaaagggatttgttatcaacagagagggtaagacacatacttgctgcctcaaccgcttgttctcatccatcaattgcattccctgaacaccaaaaaaaaagagaagaagatgaaaattttggatcttgaaactgccaaaattaatattgaaatcatcaagtaaagaataaacgttattttggttaattattacctttttctgaagttcgctgatctcactcataatcttgtcactctgcaaacacatctcgtattagtaaattgcatactcgtaagcttagagaaacttatacatggtatcaagtaattttcttaacaacctttgtttcaatcacacgcgtcaaaccagtttcaagggccttctctagctgctgaagctcttcaatgtcaagtccttgaagttcctctcctctcatttgcctatatatgatcatgtaaacacacagttagaaaatgatagtggttgatcaaaaaaaaaattagttagaaaatgatagttagttcaaaagtcatagaatatacatatataacgtaccttagtcggtggctcttgtccgcaatttctttactcattcgggcgtgatcactgttctcaaccagctaacagaataaaacattgatttaagctcttaatcatatccataatgatctaaagctcaactctctacacaggactactctacatgactactacatggatcgagtctaattaatcatatgcaataatataaagttttgtacctattaatacaaagttttaagagattcttggtcaataaatacaacaatctaaaacatattggtaattcaacggagtaatactcgattttgcaagttacagaaatcgggaaagaaaatgtgtggtcgtttcgagaatgtagctaacctgtaactcaagagatggctgatcaagcttctccaagttctttgactgcaagttatgcctctctaggacttccttcatgcttcataatataaacacattccaataaataacttattataaacaactatactgttgatattaacaatgtgcatatgtaaacaccgacaatataccaaaatctaaaatcaaaagatgcaaaccaaatccacaaaacacatttaatcccaaacatgtacattatttcatgttaacactatcgttttcagttacatatatacacaattatctgtgaaagtgtgtatgtccccgaagataggaactgagctgataactagtgggtcaaaaatccaaaatcgtatctctgtaatacgataagtcattttagatccctaatatcaataatatctctctaaatgacttttcccaacactaataaagattccaacatatctatacatatacatatatatatatatattatttttagattacttcttcaaagggaaagctttatacatccacacatatagatacttcctcatgttatggtacccacatatttctatataaatatgacattgacggcttaaacatatcataccacaatatctatatacatagatttatacatggttgacacaaatacctactatagagcatgtatttatatactaataatatacatatatgcatatccagatttacatctttttgaatattaccgtagttagataccttaatttatctaaatacagagttttactatacactttatatatgtcatttatggtcatgattaatgtttctaacaactattttaattatataaatagttagtggtcctataaagattgatacagtaaactcctatgtatcagatatacatctaaaaactctttaaagttttttgtctggatctagacaagattccttcgatgagttatgagaaatctatagagagggaagttagagagagaaagaaagacctggagctacagaactcgaacagttttccggtggaagagaagatgatgagagcgacatcggcgtcgcagagaacggagagttcttcagctttcttgaaaagccctcttcttcgtttcgaaaacgtcacttgtctcgccgttgcgttgtcgatcttcctgatctgaatcttttctctcgccatcacaacgaacaaaaaaaccctagaagcaagagagagagcttaggttttgattttaatggatctttcgagaacgggattgattttgatggatcaagattcaagaatgagagatgattaaagagagagtaaagagaagagatggaggaggaggaagaagaagccagaggaaataaattttgtgagagagagaatttttgctaaaaagggagactttaaagaagagagagagagtgacaagacgactgaaatggaaagtaaatcgtgttctttttgctaaatttagaagaataaatatgatttcaagacagtaaaaaccctagtttttgaaagatttgaaagaaagaacacactcagtcttttgtgagaagaattagatctagtcgatgaatcaacaaggaaattagagaggatcaaaagaaaaaaaactcaagaagaagaagaaaactaaaggagaaaaaaagctaagggaatatatttaattttccacctcaaaggtcgaggagagaagaagacatgagaaggttttgattggtgaaggatgagatattttcagggagaggtttattaattttataatactatcaagatgatggggtttcttaaatgattatttttggaaagaaaacgatatatattatatttttagttttagttttttttttggatattggtctgtgtgtggtggttattggatatggtgaggtaataggatttataagtctccaatgagatgagagagagaagagaagtgtgtgtttgggtcagtggggaatttctttttatagggaagcataaaatgagttgtctcactttgttcacttatactccttgtaactaattggttggtatttactgcaaaaactaactagaagacctgaagaacatcaagggctacaacgtattttcatttttgtaaatctacgtactatatggtaatggtacctcataacaaaattcagaaagaacaaaataatatcaactgtatattatttttatttatgtaaaaacatttgggaagatgacatttcagaatttttctgaggacaatgttttgtttttactgaaagaaataagtttgtgagttcggccttggtttgtaagaatccaactcggaaatgacaaaataatttgttaatttcaaagacattagtgcaataatttttgaaaatttagtagtcaatcatgtggcatataacttgtcgaaaaattgtgtccttaaaaaaagaggtttgtaacctaatgaaccatatctactcagatacatgtagtccattatacaattacaatctatgcactaatttggaaagtttgtcatgcacaaataaattttgttcaatcccagtaacaattacacacacaatgggggtatcaatcatcactgaagtatttttttataaaaccaattgaatatgtaactcaaaataaaatttaaatgaaatcactttcttacgaggttatttatcatttaacattttaatacataagctcaacattacaaatcacatatacttcaccaacgtcaacaacagaaccaaacatatgatttcaatcgccacaatcatcattccatagactaaaaagcaatttacaaaaccgtgattaaaggtaagaaaataaaattaaagggtttttaaaaataaaataatgtttaagcataccttcatacgaagaaacagtgaatagagggaccctcgaggcacgagccagagtaaaataaaaagtgtcgaccactaaaatttttcaaagggacccaaaaccagacccgaagcagccacaagaaatctgattgggacacgatccattgtccgtacagaattttatttctaaattaaagttttacccaaataaagatactccacgcaactactacaaacccattcttcttctctttattactccaagtttgcaataatctacccttcaagaatacatgtggctcgtatcactcaccccctatttgagtattatttactcttccgacgaaactcttgtgttgtattattgcgaatttattatgatactatatgaattatgaagttgcaaacggtaaaaaagtcatatggttgatgtgattaatacggtgttaaatataattatggtttgcgttaatttactgtaaactcttttcttttcttctttaactcttttctatctaattgggtaatcaagcaaatatagttgaattataatttgaaatttttgttgacaacaaaatattaatatggtttgcgtttgtgttctacgagtaatggaattatggaagtttttaaaacaaaaatgtagtattttttgaaaattttgatgacgtatattagaaaacactagaaaacaaaaccttctagtggttaaagttgctaggagaataactataagagaggtggcctgatcgatattacttatttcggcataatacatattcctttctaacgtattttaaacaaagaaaatcgttgagtttttttcagcttggtttggtttcgaaaaaaaaaaagtttgttcactcacaaaattattatcaagtaatgtttattcatatttgtcatggtttggtaaaagtagattaaatttggtagaacatccatcaattggcgtttggaaccgcatgaatcatttatatttgaaattgaatagtgtttagaggcgcacgtgacacaactggtgaggtctttgagttttgattggtcaaagtgtcagagtttttatgagtagacgactcgtgacctttcccttaacagttccaagcctctctaatgaaacattgcacctaaccttttagccattttaggcttctttctttctacacagtccctacactacacactctctctgacacatcaaggaaactacagtcaccgttatcataaagcggagtccctaatgggctttttattattattgggcttttattaggcccaaattttccttacgagtaaaataagtattattttggttcagtttctcgccggatcctgaaaatgacgacggcggcgatgacttgtacgagactgacgatatttacggtggccggaatattacttcagattattggcctctccattttcgtattcggtttcttccccgtcaagccgactctctccggcgtcaggtactactaaatcaataacatttgaagtcgaagaagaagaatctacgctctattgatttgtttatttgaaatggcagtggctcggagagctatcgagatccattctgtgattcttctctgatttcgaacgaatcggagcttcatcatccagagaaactgagattgctgtaccaggtatttgtctcttttgtgaatccaaaaacaaatgtgtaaagttcccttttgagtttgatagtggtgaatttgtaggagttatctggaatctcttccaaatatgatcgactgattttaatggtatgttgcactttgttaaaattttgattttgatctttgtgagagagtgtttttgaggatgttaaagcgatgctagtttaggttattgatgggctacctgcggagttcgttcttgggaaagatggtaaacctccagagaaggttttgaaagagtctatgccttatactcagtcactgttagctaatggagatgctattggttaccatgctaaagcagctcctccaactgttaccatgccgaggttaaaggtgtgtgtatagttgtgattaagtggatgatcacagtctaaatgaatttatttgcttgcttagttgatagaattcattgtttttttcaggcaatggtttctggggcaattggtggtttcttggatgttgcttttaattttaacacacaagctctcttagatgataatattcttggtaactattagttttcaacaatgagaaatttttcatgcttgcaaacattgaaagaaaagctatgtgacattggtccaaatttaccaggtcagtttttcaggattggttggaaaatggtgatgctcggtgatgagacgtggctcaagttatttccagggctatttatgagacatgacggtgttagcagtttctttgtgagttaatgtgatgtttggttttgttgattgcttttcttatcgacatcatggtcatctgaacaaaaaatgtttttttggacaggtcaaagatacagtacaggtagacagaaatgtttctcgacacttgcccgatgagctaaacagtgatgattggaatctcttggttagtttttactttttcttttattccccagtattggcgtctggttcatttaacgccaatggattgttctctgccttaaaatatatactgacttaaacaaaaattcctcttgtatatcaattgagcttttctgtgctttattcttactagatctaccccttatcagatccttcattaccttggtttagatcacgttggacatactggcggccgtaacaggtctttgttagtttcataactcatttgtgagtagaaaggttactagttgcatggcttattcatcttattatttgtttctctatactagccccttgatgcctgcaaaacttaaagaaatggatgatatagttagaacaatgcatttaagagccatgatggatcgcagccatgatcaaggacagactcttctggtcagtgacttttcgtatttgaaggtccatttgactttcatatgtcaagagtcaatcttatttttgttacatatacagataatagtcagtgatcatggcatgactgagaatggaaatcacggagggtcgtcatatgaagaaactgactccttaatgctctttattggcttgaatagcaatatttctgactatgcttcagctaccaataatgtagctttccaggtagaacagtcactgcaacttttgtgatataattcatcttttttcctgtccatagaacatctacctctttttgaaaaactgttgatgataatgagttatgcatgatatgaaaccaacaaatttcttctgatgtaggtagatttggcgccaactttagctcttctatttggtgtgccgatcccaaagaacaatgttggagtccttgtcccaggaacactctgttctttaagaggttaccacttttgacttcttgcattttcagttttgaatctgtggggacgcatttgactgttttttcttcactctgtctgatcatttcagattttgagcaactacgggcactagaactgaattcatggcagttactcagacttatgctagcacagatacaaagttcttcgtttccacgcgtctcctgcaattgcttccttgatggaacttgtgagggtcttgatttggatattagtgagtgttctggggataaagagaaacaacttatttgcttgtttaggaatgctgctgccctccatggcatttggaagtccaagaaatcaacagagtgcgtgatttttatgagattttctcttatggtgctcctcttgactttgaactccttatatttaactccacggatggcttttattttaataggtcgtctagtaccatggaagatttcagcagagctttagatgcatataacaccttcttgaaaactgcaagtgagtggttagcaagcaaaaccacggaggtatgttttgacatcttttcttagagttctatgaagttcttttcggaaaataacaattgtcagtcgtcactagtttccaaatctagtaaaaaatttatagtattcctaacaaactcttctatgtttgcagaaacctgttctcttactcggtcttggagtgagtgccatgcttctgtcatgcttcatctgtggtactgtctttctgtccttattcaaagaggtttaccatgagcccaaggatagggtctgcagtttgagtaatttgttgaatttagaagaggtgttcatttttgctcttcttttgatacttgttataagcatgggatctagttcaatggtggaagaagagcattatatatggcatttcatggtatcaacattccatcttctgttactcttcaagacagcgaagtcattcaaaatttccaaggggatgaacattctcagagactttaaattcggttctatcttctcgcttcttatttctggtagactactgagaggttggcatcaagggggcgtgaactggacttaccttcctgatatttctaagtggctagtgcaaggtggcagtggttatgtgaaatggattcagctaatctcaataatcctagttattggtctaggactatatactctctttcgaacaggatcgaatagaaaaggtgttcgcatcctagcatttggtttctcaacttgtgggttcctagtcttgctgcatgtagggagatatcaggatgaactgtcaaccggttttggagccactgtcacagtaaaagttatttattatcttctatctatatcttccattggagcttctttggttttgccatggtctgcgctaaacaaagacaagtcctttctagctgaagtaggtgattgcttgtatttgattggctctgcgtacatactttgctggtgtcttctacagcaacttctccaacaaccaatcaactcgggccccatacttttgctgctcctccaaatcttagcaattttatgtctttcttctagtgattttcaagttaatgaatgggtcgaggttagtttttctttttgttctttgtctgtgatttataccgcaaaaagctcaagatttaaggtttggtgtttctcttcttgttgtagattactgcactctattacatgggaatggcaggtcactttgctcttggaaacagcaacactttagcaacaatcgatgttgctggtgcttttatcgtaagtcctgtgcttcctctttgtttctaattcgctttccgtatgtatactctttacccaaacactgacacattcaccaaaaccctttttatttagggaatctctagtcattctacaatactctctgggatcttgatgttcatgatcacctatgcatctcccatgctgttccttctatccctcgtcatgtacattggtgcaaatcttagaaaccactcaaactcaacaatatcaactcaccgggaaacgagtcttggacaaattttgaagctaaagctcgggttcccttgccttgttccgctctgcatcaactcaatactcttgaccgcatatactgtggtcttactactcatgagaaatcacctctttgtatggagcgtcttctctcccaagtgagtctttgatcctgtctgctttattcggtttttcaatctgatttttctggtttagttcgatttggatcagtttggttttcgctaaaaaaaaaagaaaagattgttgctgattgtgtttggtgtacaaatgggaacaggtacctatatgtgtgtgcaaccactctgtgcacatacatcggagtttgtatcgtcgcagctactgtaacctacactttctatgtcactaccttccttagaagcaatcgcacaagacacaacaactcgtagttatggtcttttttattatataggagggagatagagactaatagagatactgtgattctgaaatttaaagtagaagatcatgggatccagttatttaatttcacgagtctgcttaaaacagtacttttttttaactgtatatatctactttttagttaacaatttattatcttgaatttacagttatgaattcaacactgaactacactaacgtagaacaataaattaccacacaaaaaaacataatatgtaattgctttacaaaaccaaacaaaaactctgcaaaacaattggtcttcttctttacttcattctagttgtcgatagtttagaagactcattggtcctcactctctataacaaaatattggaatcggtacgtgtcttggtgacggagcagcatccattgtgactgaaccactaaacagttctcgctcttgaatctgcagtgtcttgattgtgctcgtagctttagccgacttctcctgaaccttcgctttagattgcgatagtttcgaaggtttcaataacgtttcctgaacatcagctttagactgtgatggtttcgaagatttcaataacgtctcctgaacatcagctttagattgtgatggtttcgaaggtttcaataacgtctcctgaacatcagctttagactgtgatggtttcgaaggtttcaataacgtttcctgaacatcagctttaatttgcgatggtttcgaaggtttaaaaggaaacttttgtgggtaacaaaaacgtttcaagacaaagagatgaaccttttgatgaacatgtaaaacagagttacgagagaagaagtaaaagccaattccgtgttttgtaagaaacggaacggcatgaacctctctgacgaggtaacggtgtgttaacataataatcgacatcttcaagagagatttgatgattggtcggaaaatggtagacttatctattcttctacgagttactgagagcttgatcaagtaataattgtgactaatgagagggttcaaggttatttatagaagttgggttctttactcgtagaaaataaaagaaaattgatacaaacaaaaggaaacatgagtctgtccgtttgtgatatgtttcctttttatgatttaggactgtcggtctcacttattttgttttccttaatctgttttaccttaatcatgttttcctttactaagtttgaaattttttcaattaaacttgattattacaagaagtttctaactagtttaaaggacaagttagggtttctcgagagtaattgaatttagggttcttgagagtcaaagttaacaaccctttttgtttgttgggagatcaccctatttataccgtcgggtcctcgtcaaaagtaattcaggtttgaattcataccaaaaaaagaaaatttaggtttgaatgttttttttcatcaaacattgtaaaattatgaaaaaagtatcagattaaaaaacaattggaaataagaaaactctttacttcttgttagtcaagtactgtgaagattagtggatacagattatttgctaaaaacaaagataaatagacaataattgctccacaaaacaaaatctaattgagtaattggtcttcttcttctcattcaagtcgtgcttagctttgaagactctttgatcatctttacaccacaaaatatcggaatcggtacatgtcttggcgaaggagcagcacacattgtgacggaaccatcaaaaaattctacttcttcactcggtgtttgaatcggtttctcatgaaccgtatccggtttagattgagattttccggttttagacggtttaaaataagctttttgtgggtaagaaggtcgtttcttcaagccggagcgaggaaccactttttgacgtacatgtaaaaaggagttacgacaaaagtaatggtaaccaaatccttgttttgtaagaaacggaacggcaaaaaagtcttggacgaagtaacggtgtactaacattatcgacaacttcaaagagagatttgtgttcttcgatgggttcttgttcgtctattgctttcttaggaacgagagcttaatcaattgatagtaagaaataatgagagggttaaaggttatttatagtcattgagttctttactaattggaatccaaatcaaaaaaaaaaaaaaaagaaggaattttactccattacaaattaggaaacatgtttatgtaagtttgtgttgtttctttttttctatgacttaccgatatctgcgttattgttatttccttaatctatatttattaattttcaaaatattatcgcttaacaaaaaatattaaaagattctcgtcttcttctcatttcaagtcttcgttagctacttagcttcgtagactctttaatctattttttaaaaaaacaaacaatgtcgagagaaatatgaaatatgtataatgtattccttgtttgttaaaaaaaacacacactctttaatcatctatctgacgcaaaaattagaaatatgtattctttattaatttcaaaaaaaaattaacatgttattcttgttaaaaaaaaaattaaaaaggagatatgtgttgcttccggaccttccgccatgcaatatcactattttaacatatatatactgtcgcaacaaataaaagctcataaaccataattaattaaatctatttgttggttgaccaaacaaaatattagttgtaaaaaagtaaatatttccaattaaactgatattatttgcttttcacctattctcatcagatattgtcgcttgtattttttaaaattaaaccaaaaacaaaccgaattgttttcgctatacatagtcactcatcgaagttcaaacaaaggccaaaccaaaaggcaaaaccatcggattataaatttatttattgatatactaattttctaaatttgtttatcaaattatttttctcacttttttgtagttcttttatttgtgaaaatttattttattttataatatttaaataaaatataatacatatacattaaactaggttagctgaaatctccatgtgtcatggttgtttctagttagaacttagaagtgaccaatcttacttgtggttgtggaacaagtaactctaaataagttgcaacaacaaaacttcttcaaacctacttctcatcaaacctcaaaaccctaactcctctataaatacacacaaactccttcataatctctccatcatcactcacaatcaaacctctttccagtgacaactcaaacccctaatccccaaaatggctcactggttgtcatccctagtcattgcattaacattcacaagctttttcactggtctctcagctagtcgccaccttcttcaatcaacaccagctattaccccaccggttacaacaacatttccaccacttcccacaaccacaatgccaccatttcctccttcaacttctcttcctcagccaactgcgtttccgccattaccaagctcacaaataccttctttacctaacccagcacaacccattaatatcccaaacttcccacaaatcaatatccctaacttcccaatttctatcccaaacaacttcccattcaatcttcccaccagcattccaacaatcccattcttcactccaccaccttccaaatgagaagctaattaagctctatagctagctactgccacacaacacatgaccacgataccatctatctattgtttgcatattatgtgttgtaaacttgtaatgttttttattcttttttttgtctaagtttgttattcttttactgtcgtttgatgttatccttgttgttgatgttgttttcttttaatcagttgtttttgtaatatatacagcttattcttattctagtgattacaaactttcttgttcctcttaatctctgtaaaccaaacaatataaattatatacgaattatcattccctgaaatgtttgcatagacaactcaaattacatgagacattctgaaaaaattattaatcaacgtttaattcaataataactttgtctttttatcgtttaatcaattacctgagcaaatcacggacaccaccaacaattttagaagaaaccttaccgatgatcagatgaatgatacgacttgtccctggcgatgaagcccaggcccataactaggcccaatatatatgatcacatatggtccaagataacttatcgttatgtgcagtaatttactgaaaaccaaagaccatatttttatgtaatgtccgtatagctaggacttttagagattgtgtctggctagaataattgcccatttcataattctgagaattgaaagaaatttggtatgctaagttttccaatgtaaatcattcaatgacagtagagagagcttctgtctttcgtcaaagggaaagccatcaaaaaagtcaagagtcaacaacttctaggccactccgacatcttaggtgacacgtgtgagtttggtaagaagatttaaaacggcttttacttggcgggagaggtacaactacaaagtcattagtcaactcttttagaccctttttggcccaaacgtcctcttcgggccacacggagtttattaaatcgtggtttaattgcttaattaatttatattttattttatttttccttctttatttgttgcgtaattaattgttttcttcaaataaataaagtcaatggtggtataactcatttcttgccggtacaagaccgaatgaaaaacataatttacatcacaaatgataattttgcgatatttttttatataatgaagtgaacccattttgttacgaacgtatagtcaaataacaagaactaagtagcctataaatattttttcttttatagttaagaaatttggaggtcatgtggattataaattcttcaaaccaaattggaaaactaattagatcaagctttaaaaaaaaaaaaaaaatgactcggatttttttatagtaatagcagttcccagttggaacatgactcggattaaaaaaaagtgtataattgtaatcttgcacaccaatctgtccacaacagttggaaagtttaaaaaatattaaacaagttaagagtacgtttggaaggtcaccgtgattattataattagattagtgttttataatgtctcattgtagtttgacaaagcctgttagagtattatactagccaaaaaacagaacacgagaaaaataaaataacacacatagctgtatttctttcttatttgtttaatatagtgaatgtcaaaatacttttctgaagtactaacagataagaactcagtacgtagcctattcttgtagtttagaaattggaggtcatgtctcatgtgtatagtaattttcttcaaaccaatgtttttttatcgaaaattagatcatgttaaaacctttttttgtttttgtcatagttcccatttggaacttattaaagaaaaaccaaataattatccccgttggatctagctatattagtaatcttgcgcttatctttccaacaacaattgaatttttaaaaatattagataacttaccgtgataaattccaaaacaaaagtcagtcaccgtgataaatataatccgattagtccatgtaatgtctaattgtattatatcatttgataatgcctgttggagtattagagtagataaaataacatacatagctggaattttttcttaatgttgatctctttaatataatatagtgtaaaagttagttatttagtagtcaaatgttaaattaaatagttcacgatggaaaactggaagaagacgtcaaaatatactattgacttttttgtgcgaaaatatactattgactaagaaaactaaaaagtggtatgaaagacaagtcagagcattattattgcttgtctcttaaattagttcttaggttaagaacatctcattctatctcttatataagagatagaatgagatgtttttagtaatcaattacaaaaaaaaatcttaagaactaatataagagacaaccaataatgatgctctcagaagcctatttatattttcaattagaatgtccggtttaagagttaagacccttgcacgcgtggcctgagcacgccaacattgcacaagcatacgagtttactatatgaaaagaaaagtcaattatgtagtaagtgaaaataaaatctcatagaaacgatttgtcttctttaacaacaaaattaataaaaccgatttgtcttgtgaaaaattaaaagagatgtttctaggcttctagcagagacgtggtaaacactagggttttagataacactgtaggaaaattaattgggttttggttaatggttacacagctaattcacccttattttttctaagaggaagaaagagtaaaaaattagtaaatttgagaaacgttagcatcgtaacaccaaatgactcgactactctcgtgcttcaccgcatagtatttaattatcttatttgtatcaacacaatgcatgagttctgtatatatgagtaataaacaaacgtggaatatactttcatgagatgcaaagtggcagaggcatcaatgtaggtaggtaagttctctgaggctgcaagaagaatctctgttttttattttaagcagagctttatatatagacgacgccaatggatggctctaagacagtaagacctctgacactcaaatattactggagtatggttcctgataccatattctatattctacaatcttttaacttttactaaaggaacaattcaaaaaaaaaaaaagtaagaaaaattgttatatcatataatgttttcatattcataattatttattcagctattagtttaaaaatggattttttaattaatatattatttgatattgtatatgaaataagaggttcgaaactaaatcaagacgaaaaccaacttatataaaatcaagattaaataatcgcattccattattagacgtacaccagaatcataatcgtatgaaatcaattacaaacaattgatgagaaaaggaatctataattcttcaaggaataatcaaacatggaaggaagaacaaagaaagcatcccatgtggtggggtggaaaataattcaagtgtccattaatatctctctctgtaaggctataaccaatgaataacactgtcaatccggtacgaatacgatcacatcaaaaagtgaaaaatgatgcttaaaccaactaccattaattccttttttggcgtcaacattgatttttcaatttattaagattttttttactaatgtaacatagatgaaagtgaggttttctcgttacaataaaaaaaaaagaagctacatagccagtaagccagagaactaaacgtttcttgtacatgcatgttgcatgagaactcttctagtgagagaactcttggcccaaacaatcaattttttgaaatattaaattaagcttacaaatttgcaagagtgatgattgctatattgcataagaggtatttaacttggatttttttaaaaaaaaaaacaaattgggacgaaaatgtagtctttctttttttgtgtgtgtaaagattaatatgttagaagaatagcttatatattgctaaaaaaaataaaaatgaatagcttatatataaaatagcaaaatcaagaaaacgacattacttttaagctgaatagatatgaattttttgaaatgccaaaagttattatataatagatgaacaaagttttttttaaaatatagttataattttaaaacgtacgggataaattaaaagatcactttttcacgttttctttttttaacaaaacttttgttagataatctgaaatattactcattatttcccatattctattaagtatttgtgaataaattgtatacagctaaacacacataaattacaaatttattgatttaatatactttactactttggttaaaaagtaaacatattcaaattcctttatttcttctactttggagctgcattaaacaacttccttgaataattacgtaattaaaaacaaattaccaaatatttagtcaaaaaataatttagtgaatatatcaaaaataaaaaataaaggaaagtcggacgatactaacaaaattattaaaggaagatgaatttctctttccttgtgcgcaaaatagcaacaagtctccgcgtttcctctctttctctctttcccttatttaaacacacttcgtcttctacctctaaacaatctcaccttctctctccctctctataacaaacattaatacacacaccaaaaaaaaacctgtttatgtctcaaagatctctgattcctcattcttcttctatagcttttggtctccattctcatctcttaatctccagtgagatcagctccaattctaactggtctctctaaataaaaaacagaaataaaaatccaacctttttcaattttcgttcaattttcccggaaaaaaaagcgatccttttgatttttcgatttctccaagtaacaattcaaaatgggtctaaagggttttgctgaaggaggaatagcttcgattgttgcgggttgttcgacccacccgcttgatctaatcaaggtccgaatgcaacttcaaggcgaatcagctccgattcaaaccaatctccgaccagctcttgcttttcagacttcgaccaccgtcaacgcgcctcctctacgtgttggtgtaatcggagtcggatctcgtttaataagagaagaaggcatgcgtgctctgttttccggcgtctccgccaccgttcttcgtcaaactctgtattcaacgactcgtatgggtttatacgacatcatcaaaggagaatggaccgacccggaaacaaaaacgatgcctttaatgaaaaaaatcggtgccggagccatcgccggagcaatcggagccgccgttgggaatcctgctgacgtggcgatggtgaggatgcaagccgatggtcgtttaccgttgactgatagaagaaactacaaaagcgttttagacgcgatcacgcaaatgattcgcggtgaaggcgttacgtcgttgtggagaggatcgtctttgacgataaacagagcaatgcttgtgacgtcatcgcagttggcttcgtatgattctgttaaagagacgattttggagaaagggttgttgaaagatgggcttgggactcatgtgtcggcgagtttcgcggcggggtttgttgcgagcgttgcgagtaatcctgttgatgtgattaagacgagagtgatgaatatgaaggtggtggctggagttgctccgccgtataaaggagcggttgattgtgctttgaaaacggtgaaagcggaagggattatgtctttgtataaaggttttatcccgacggtttcgagacaagcaccgttcacggtggttttgtttgttacgcttgaacaagttaagaagttgttcaaggactatgacttttgaaaaaaacaagagttgaattatgttgaagaagatgaatgatggtggcgacaataagcttctctttttttctggttataattttcttttgattatttgagtagttttaaattgtttcccatttgttggaatagatctatgatatgataattcttctcatggagaagaaagaaagaaagaaacagttcatttgattcattattcaaggcagtgaaatacttagattcgtttatgttaattttgaactatgtaatattcgtttctttttcttgaaagctttatttttagtcaaaaaaagatgatgctttacaaagattttttggaaagattgaagatctttgataaaaaatcttcggtaatcaatgttcaagaaaagaaagcaccacaccaccgaatttcgcatcaattatttagatatatttatgttaagtttgaactatgtaatattccttctttttttccttccggaaactgtttttcattcaaagatgaattctttttacatagagctgaaattcaaagtaataaatgttcaagaaagcattagaccacgaccacccaggggcggactcacgttgtgattggtgggggcaactgccaccagcaaaatataaatagttgatgatatttgtatagaaatattgtatgtaaggtaggaaagtggtaaggaatgcccccactaaaaccaagaggtcatagcttcaaacccttttagcaacattttgcccccattaaatatttcttctggatccgccctgagaccacctaattttacacctttttcttagcaacaaaaaacttcatatatcactaagcatgtttgaataggttggtcttatatgcaaaccactctcaaacctgagcttagatgggaaaatatagaagttcaagagagaaacagtcggcgtgaacattattgttcctagagatatgataaatcgaaaagaatctaaaacggaaacgtataagattaaaagaatcaagttctgtggcaaatgcatgccatggttcttcatcatctatggcttttactaactttgcaatccgtttcaacatgaaacgaattcagactgtattgtatcacgcttccgtagtacatgaagagcacttaactcagagtggagaagtgcaaatatatacagtaatacagaataccttgtctggcctgtttgtacacaatatttagtatttgccgacatattttatttccacccaaagctattgttcaagatatatttgctacggtggaagttaaagagtacagtccagataaatcgatataaaaattggactataggtatttttacatggatttttttacctatagaaaaaaaaaatgaaactgaatttaagaaaccccgattcttttgaaaatcgtataaaccatggtattatatcaaatcgtataaaacagttgatatgaaatatatatagatatatattatttatcattgcttgttatatatatggattattactatgtctttactgaatcctcatacgacgagataaatgatttttaattagatgaaagtttcatgaaactttggacatgttcaaattattctataaattaatttcgaaggacctttcctagctatatatatatatatcaaagatcaataatagacatgtatcaagctgtagacaatgaaatatcgcaaaacgttaagattacatcaggtcaaccaaaaagtttcattaaaaaaaaagagagacaaaatcaagaatcagtaacaagcacccacgtgttattgagatggctttagtttcacacatacgttactatgtagaatcttctttcagcatcataaactaaaagcgcgtctacgagaacgcactttccacacgtttaccgactcaaacctaattcctcttttaagtcatcagaatcagattcgatcaactcattcgttgcgttgatatggattgttctcttcttacggacataaacgattctttcaaaactcttgctttgttggagtaatgtttagtaacgattctttcaaaactctcagcaaacataaacttttggtaacgataaagaactaacaccaaattgggaaaagaatcacaccaactgtttgaattggatacgaaaccatataaagcagatgaacataatagacaaattttgattatgttaccctataagaataagggcaagaggatttacactttgaagttgaatttgagttttactagattaacattgatttatatatcatggttgattctttttgtaaaaagtttaaaccaaaatataactccaaacttgaattttatatatctattaaattgaccaagataatttctaggcaaatatttgtaggacgaactacaatgataatagacatagacaatacaaacatacaagatcagagtaataacaaatcacattgttatggaatttaccaaaatgttacaaaccaatatctatcaaaatcaaaaccaacaaccagtcactaacagaataacaacaaaaaattgatgttgaaaattctcatctcgaacggaatgccgacgtcttcgctagtggacatgtccacactacacaatcaaagcaataccgttccatgtctttctttaagattataggtgatacaacataatgagcagcaacatagcagaatcatcaagagtaatgagtcaacgaaatttccaatcatcactcatcaaaaatatagagactatatttactaataagtgatgacgagaaagctcagctgacttcttgaaatactttcgaagattcaactatattactctcattcttatttataatcatatagaccgggattggtaactctaaatcaattacctatatcaatagcaaaattcacaacaaaagaaaaattaacagcaaaattattcgtaaaaagtgaattttagagaagcagctttttttagttgctcagttaaccgctcaggtcgacattatagtcgctgactcattaagcacaatgctttcaaaaaatatttttgctcatccttgcaacaaaacaaaacaaaacatagaactaagcaagtaatgaaacatctaaagcagaaagagtaaatctttgtcttaaaatgagataagtatggttgctcagctaaccgctcaggttcgactattttgtcgaccgttcatgaagtgtaaacactttcaatttcattataagatctcatcattgcaaccataactaagcaagaaattcacaaaaaccccttaaatctagaatagagagaacacgagactacgtactaagcaggagtgcaggaccaattcaacattccctagaacctcgagacagtatctgatacatctatagattacctttacatatatactaacggagattagggtttcaaaaaaccaggacacaaaattgagtgaaccataaagcagagaaaaaaatagggtttttcagttttcgccggatctctcttgtcgtctttaagatgagatatttatatagaggaagactctagggttttagttgtttgggctctgagtttcttactatttgagataattaaaaggcccagataatatttatgggcttttgattggactgagttctattgatcaatcatttcgaatatggtgggtaggcgtaaaatgggctacagtttctctgtcggatgaaggacatcacataatcatgaaaataacttttgtattgcgattttgaagatgaacaagcagcgtttcgtgacataagaatacctaagaaatagtaaacttgaatgttgtcttaataaactttccagttgttagaccattttcagtagggatttctcataagagtttctcacaattaaataaataaaaataataaaaataaaggagagagtgtatagaaagtttctcaaatgaaaaactctaagatactctctacaaccaatcatgacatttctcttttcactattggttcaattttttaactaatattttttttaatcaaataatcaaattagaatataatattaattttttttttgagaaactttgtgagtttctcattgatgaagatgcccttaaatttgaattcaaatagtagttgactaatggtcaacgatatttctgttcggaatagtaaacgtcgtcgacaacattcgttttttagtttctaaaacatatataaaccctaagaaaaaaaaatgtattctaaggttcgtaattatatcgttaaaggacgtttactattagttaacctttaaccgagctcaaatttaacgactttaaaatttatttagagaaaattaattagttggtggttttattttagaaaaaaaaaagttggaggtttttattaggaattgttttcaattccaaggttttatatggaacgaaaaatattgaaagttttagttgggaaaatgttttaaaatggatattttatttgagattttttcctaattataattatgttgataagtctttgactagatggaaaatgtaaaatagaagggaagaggaggcattttgggtagtttagcgtaatagccaactaagagattagtataggcaattaatcatgattgctcaatgaaaatcgtatatgcttagatcacaaaaatccaaaggcttgcgcacaaatatggaatagcttacaactttcaaaaccatagagttaccaaaatgtgccagaaaatattttggacctttttgtgtttttatataaaatggaacaagcgtgattcttacccaaagtaaagtcagcaattttgtagtcaagtggtaaagtaattacatagtttaataatcgttggatccattctgatctagtagtggtcaagcacatagctgtagaacataagcgttacactataactctaattaattggaggatcgggcaccgagctgaaatctccgaacctgagccaaaatttccgaattcaacaccgaaccaaacagtaaaataaccaaaattgaaaaggaaaatataccgagtttactgatcttaaaccgaactcgaactatagaaaacctaatcaaactaaccaaattacattaaaaaaaactattatttagttcactatgttcaatgtttaacttagtatgctatagatctaagtaagataaacaattttgcagaagaaatagattgcaaaaactcaaatatttaacatgaatcattagctagttacatggattgaggagtccactataacccattaaactattcttaatagctctatttcatttgattgttgaatctcgttttatttgcttgttgttaaactctattgttttactcgactgttgaactcgacttgcttgcgtctgatcatttatgcttctttgattttgagttgaagtatgtgttcctggtctttagtgctttattgatttgtgttccttgtttttctttagtactggtaatcttgcattttctttagtttattgttttgtttacttttggtctttagtttcaattgatatgcatgctgcttcattgcttagttgtttagttctttacattctccttagtatagttgcatttgaatttggtattgcatgttaatctattgtttaagttcaatagaaacccaaaccttatcatatttgacttgacttgacttaaataattgttgtttatgtcttgaatatttgcaatcacacaaaggattggattgatacccttctatgctgcaatgatattgatatgcttagtagggaattcatagatcattgagatagtaaagtataaaatggttctctgagacaaatttttggccttggttataaagaacaaactgtttagtattgctgagatgtggcatgtagttgttataggctctctgattctgaatgtaatttatctattcagtttgagaagtctctccttcttggatttagaagtatttttctttagtaatatagtgggatggcctcagttgagataataaaagcgtgtccaaacgaaactgatagttttgattccaaatggagattattttctagaacctaaaaaccccaaaacaaaaaaaaaatccggaaataaagttgtttagtaatttttcttcagtgacttccactccttagataatcaatatcgtaattgttgtcattgttactagaaaacacataaaataatttccaaaatttatatgttaagtaatatgttggaaaccctaaaatctgatgtttgcttgagctcatatcgcaacttgtacgtttacgtgaagtctaatccacatctgactactgctaaagttagtttatcctatttagtttcttctgtagtggggatataattttcataatcgtgaccgcttcataacaatgtcgaatgggccaaatccgcgaacacttcacctagttaaaagttaaaaacctaataaaggtgagttacattacctaaatcttgatttgaactaagcaattttcatgctatgcgggttagatttctaaaattattagatcatttattagcaaatatcttttgtatcagattactttgccatataactaggtgtttaagaatagaggaaggatgtgaacacatgttgaaaatgatgtctaaacgatcgaatccaaattaacacttataaatcgatccggaaaatcatgaaaatgaaaagaaatgtatagtgttagttaaactgtaattaacttaaacatgacaaaatattttatataagtgaagttactaaatgattcgtcttaatagaaacatagccttagctatatatttttttccttaggttggatgtttccacaactccgcatttcatattttgtttctaaggttatgtggtggtagtccgatgttttaggtcaagttttggtcgatggttcttctttctatctttgacattttcttttcttggctttcaatcagtctttcatatctactacagcggtaaaaacagttgggcgtctttaagtttattctactctagttcaaaatcataagtgattgagatcttattagttattgttttttcggtttatatctcgacgttaccgatgttggcgaatagcacaaggttccctaaccttaacctcaaaagaaagatccactaaatagaagtaaataaagcatatgattcaatttcagaagtttacaaaacactaaacaagaacatgaaaaccaaaaaatagtgaattgtcttcttttttgggaatagtatctctggagatttcaacatttatgaccaacttatttttttggaatactttttttttatcgttgactttatgtaatttctaaattttactatgacaattttttttttttttttttttttgtcgtttttactatgacaatttaaatttagtttataaggacttgtgatattaaactattaataacaatatgatttaaattttaaatataatttatatttccacatattgttcttagtgtatattctctgtattttccatttcgagtctgtggagtggtctctcccctctctaccctaaaacacactcacccactttcctctgtataagcctctctctcctctctcttctcctctgccatgaaaatcgcagttcctcaagacaaaacctcctcagaaatctcccatctttgatgacttttgcttccttagttttcactttcttgtccgaacgctctcaaaaactttgagaccaccccaataaacgaattaaacagactattatcaatcaatacacaacacaacaatcaaaccaaaccccatggctgagaatcttgcttgtggtgaaaccagcgagtcatggatcattgacaacgacgatgatgatatcaactatggcggcggatttacgaacgagattgattacaatcaccaactttttgctaaagacgacaactttggcggcaacggatcaattccgatgatgggttcttcttcatcgtccttgagtgaagacagaatcaaagagatgttggtgagagagattgagttttgccctggaactgattatgttaagagattgctttctggtgatttggatttgtctgttcgaaaccaagctcttgattggattctaaaggtatgtgatttcttcttttgattgctttgatctgtgttgtgttttaagacaaacctcaaatctggtttggtctctttttgtgctttgtgattgagtttaagtgtgttctttgatcagtttgatagctcattcattctctgatgtatttattatagattaattgaatcttctctatagattgaggtattgatcttgttgagtaattgagttcttttgtctttaatgccaattgttctacaggtttgtgctcattaccattttggacatctgtgcatatgcctatccatgaactacttggatcggttcttaacatcctatgaattgccggtaagttgcatcgtctttgcggattggtttcatcgtattcgagacaatacgatgaccggtttgtgtgttttcgattgcgtagaaagacaaggattgggctgctcagttactagctgtgtcttgcttatcattagcatccaaaatggaagaaactgatgtgcctcacattgttgatttacaggtgcaacttacatttagtccttaatagcttcagtcttcttacgaagagtcgaaaatcgaggttttagtggaactaatcttgaaatgttgttcctatgagcaggtggaagatcccaagtttgtttttgaggccaaaacaataaaaaggatggagcttttggttgtcaccactttgaattggagattgcaagctctaactccattctccttcattgattatttcgttgacaagatcagtggtcacgtgtcggagaatttgatctatagatcgtcaagattcatcttaaacaccaccaaaggtgcgtcatttattgatcagaagcaagctataacaacattctttctttatttgcaactaacttggctttgtttaatgaggaaggctgatacgtttctgtttataaaattgaatgcagcaattgaattcttagacttcaggccttctgagatagctgcagctgctgcagtgtctgtttccatttcaggagaaacagaatgcattgatgaggaaaaggcactgtctagtctcatatatgtaaaacaggtaattaacattcggtatgatagcgaaagacttaaacctttactgtttcaagaacacacatttcatctgatcattgtcttcctttagcaggagagggtgaagagatgtttgaatctgatgagaagtctcactggggaggagaatgtgcggggaactagtttatcgcaggagcaggcgcgagttgcggtaagagctgtacctgcaagtccagttggagtgttggaagcaacatgtttgagctataggagtgaagagagaacagttgagtcatgtacaaattcctcacagagtagtccagacaacaacaacaacaacaacaacagcaacaagaggaggagaaaacaatgagagagaataaaagagtcatacattgctttttacaacccaaaaccacaagtactcatgacatttgaggttcttatttatttttttggttttttttttctacataaattttctttttctttctttgatttctcattttcaatctgaaaattggattgaatatgagagttttgtgagaaaggaaaaaagaaaataagagagagagagagagctctttggaaggcggcaaaattaataagtcattattgatgatgatgagagacatccctgttcttgctccaagggacttttttttttctacataatgtcagagatataattaaaaaaaaaagaaatagaaagagaattaattttatgatttttgtgtcctcaaatatgcactatagtatatatcttttattttaacatatgtcagaagttataaagtatcatataatgcagtagagattattttaaatttatattaaaaaaaacttttatcacagaaaaatctatattctctccattttacaaaaaatttgttgttcctataaatatgcatatatcatgttaaaaaaaactgttgttccgataaatttttatcacataaaaatctatattttctccattatcggaacatacaattttttctaaactgttctaaatcacatcgtagtgacatgagattacatttttgtgaatgtagtattgaattggaacactgtaaatattgatgactctagtacctataatttaaattcaaattatttagaagcttttcaacaattaagtaagatattcctaaatattttcaacaattaagtaagacatttccaaaaaaaatttaaaaataatactaaatttgtgctatttgtggaacattcgaaaacatgtgatattttttttgaaactaaacttatttttgcccttaaatatattcaagttcttactattctcaagaacttctagttataaaaagaagtacaattgacattatttaaaattaaaataatttctaaaacgatatacaagagaatttatttttaaaaacccttactatttacctggttactggttagtaacttattacatattaatacaacccttgaattttatgtatttttactattatctttgctttgaaaaaaaatatctaattttcccaacaacaaaaatacttaattggtttaaaagacaattgcatgttttggggattggagaagagaaaaccacaatgggccccgaaaagagtttagtgggcccatttatttttgttttgactgtgcgaccggtcaacatctctctctatctctctcctcgtgtctgagaaaacagaaaaaataataatctctgagcataagaaaccttgggaatctactgccttcttttcgcttatttatgcacataaataatatatttctatattcttttgttgttttgtatttaactatttatatattctgatgcagctcaatattattataagcaattaatatagctaaacgtgattaccacccatttacgaacataactccaaagtacttaagttaagttcatctaaaacaacatttttacttctagttttaatattcaacaaataataatactataccaatatttttatttaattagtgtgattgagttatttaaacggcgattttgttgttgttttatttgtaaactttaagtgtgttaatttaagttttatggatataaaagaaacaagatttagttaataaaaattgaatcttagatcttagatcgagaatggtgtaaaacgagatgagcatcttcttgggggtttcaaatatgtatatgcatgtttgtgtgtaaaatttaatttattcttccattatgacaacttttttaaaaaggttaaaaaaaattttaacactatgcatgctggcggagaaatattttgatatgaatattacaaacaaaattaaaactactcatctaaaaaaggttataacataaaaatatagatgcaagtttttggaatttctttactcgtctcttttcgtaacatgtatacttgtggatctgtgtgtggtgtgttctttagtgtgtgtctagcaacctaattcagcgatttacaaatagctgtttttaactcaaaatataaaactaataatagtttacaagtgaaagacaaagagttgggagtcccgcatccgttaataagaaaaataatacttttctatcgttgtggtagctcatgcgctacctccaaaacaacaaggcaaacataatatacgtaaatacataataaattggagaaaaatatatgatttttcatctatccaaataaatagaaagtatgatatgtcaaactactactactaataaaaattacagtgactaataaagtatatgaatctaaccatatacaagttattttatctaattttctatatacaaatgccaaagtgttaatcatgagtactaaatccgttaaccttaaaattagaattttaaatcaaattagcacgataaacttgttttgattgataacaataacggaaacgaatctagtttaacataacatcgtgatttcagacaactttttaactttagtgtttggaatatttatacatatcggtaatatctataaactatatacgaatatataagttccaagtgtacatgtaagttggtatatgcggcatgcctggtctttttttctcaatatacaattaactaactatttcgtcatttcagattttgttaaatattctcaaacacacaagacactgtacttttttcttatcagttatctaatattaattttcgtcagcttatattatggaaatggaatccatgatagcatattatgctttgtttttttaagaaaataatacaggataagatataaaactacacgtttaagccataaggtagttattttatgtcatgttttaaaaacaacacaggaacttttactattagttcaaaattagacatctaattaatgttaacaagaaggattttggttctcgcaaacattaattacacacgtaatggtaattattttattcttatcttatgtaatctcatcaacttttgatcatccacacttgtagatttaagattctctgtataatgatttatattattcttaaaactttaaattataccaaacatagaaaagctcaaaaagagaaaaagtaaaatgggggaaaaagggtaaaaagaaaagaacaagggtcaacatgtaaaaagtgaaaagtgtgggggagagtgcattttgagggagtcataaaagtgtggggaacctttcgaacttacttgcatagttttcatcttctctttagttagccttcactttcttgcttctcgttttttagtcacagttataattattcttttcgtaaaatttagtactcaacaataagaattatttaaattaagtgaaacgactgagaatttagctctataaagaaaaatgagagtagaatgatatctagttattgagatttcaataattataatttatatgaaatttcaatctttaatctcgcatacacaaactctgaatcatttagaaatttgttaccagtgaagataattaaaaaggaaaaaccaaaaaaaaaacaagaagggatgaattacctaaaaacaggtaaaaaatgaaagatcatacaagttaagaaccacaaatacaatactatatactttttgtagtttccaataggtctaggcattcagattttcgaatcgtattatccgaaatatcctaaatagccaaattatccaaaatctatccgatcaaacataaaattataatatgtaatgaattgttttggagtagcggatacccgatcggattttggatatctgatatgactcgaatttaacaggtcaacctgattttactaagagcacctccaacgggaggttttattggaaaaaagttgagtctctcttgtttaaagtgaataaataaattaaaatacagaataagttagagaatcggctttctcgacagagtttttggaagctgagagagtcccatacgtggcgcatcgtggttggctcttttagttttaacaaaagcaaacaaaaatattctcctctctctacttctctcttctccaattgaactttctgaagcaaagatttttgcttatcttatctgaatcttcgtcgctaatctgatataaatttgaagatatgatcaaagccaccatggatcttggttgcctggatttgggatgtctttctgacaagaaaagcggcgtcggagtttccaatctaatggattttgttttcccgtctgatgtcttccagtgacattgaattgagtttcttcctgttcactagaaaaattagggttggtaatttaggctctcgtataggggaattgaaaatggcagttccggaatagtgaagctgttgtttggtgttgtttaggaggttgtgagataggaagatgattaagctttgattgatttagttgtttacatgatctgcttttgtcgcaatgccatcgtattagttggaaaatctagctaaccacctggctaaattagttcatccatcatgcttcaatatgttttctctactggaaatatgaatctaaagtttgtatgttatgtatggaatcttaccagttttttttgttttgttttggactccttctttcttagcattctttgattccttcttctccctcatatggggattttacatttacgttctgtggcagacccactacatgctatgacttgcaaaattgcagaagaaaaaatatactgttggagtcaaagagttgcaaagggtatggatccttgtttatcctaagctttttttcctgtaaaatttataaatggagatgattgtttaagttgtaacattgagacctaggtagtatagtttccacttaaatctccatcgttttcttttgaaagctgtctaagtggatactctggatactaattttcgttagaaaaatcactagagatgggttcgtttggttgtttcataaaatactgcaaaacaataattttgataccagttttctgctaacttcatgtagctatgtttcatggccattatatatgtctcgaacaaaagagaaaagtttttttgtgtccaattcaatgcattcatttgttctagtaaatttcacttgtggtgaatctcttttctaataaagttttagctaagtttcctgagcttaattttgctgacttttgatcaatgtagttaatcaaggcaattctttcaacatgaaagtttagagagactaccactagagagattaccattggactcttaaaaattaacaaaaacaaaacataagctctcttctaataatttgacaaaaaaaatattaaataattgtagagagtccatggggaggctctcaccattgaagatggcctaagtaaccaaaaccggttcggatcgatttggatcgtattttttagattatatgcactttccagtttgaattgtaagagaggcgtgaacagagagattaaggagagaaagttgaaggaagagacaaagaacaattaaaagaacaaaagtggccctaaggaacacattttaactctaccaaagttttgtaattgataaataacttcactatttgcacacacacaaaaaaaaagataaataacttcaatgactttcctactaaaattaaataaataatatgatttgatacatcataacaaggaaccaagaatgctactgtctatacatttcaaggcttatttttatcatcagtttgtttcgtgattgaataataatatctttttagatgaaatcgggttggcccgttgatgtcaagcaacgatgccacattcgactattaggatccactgattttggatatgcaattacctcagtgattggcaaatatgcatagtgagtgttgattatgcctaccgtgattccactgtatccagcaaacgcaccatgaacctgttttttataagatcataagcttaacaaattcaatggacttaaaacaaatcggaacatttttagtttctacttctaagattcttatctaaagtgatgagagagtgacttgaagagatgtgtgtgtgagtgacttacagcgttttgtccaagaacggtgcagaggataccatccgaggcatttgcacgtacagcgcgaatcatgtatgttggatcaatatacttcacatctattggagtacttatttctttgaaatacttcttagtctattcgacaaaacaagaagaagatagattgtcaaatcataaagaagcaacaaagtttacactatggaaatctcaagtctcaaccaaatgttgcttatatctaacctcttgttgaatatacacaccgaaatcaccaagtacggcgtttccagatgcatctttggcattggttttctcaagaaaattctgaaacaacatgccaagaaaatgtaaacaaagatataacttctggacaaagaactcaagtagaggaaatagctccttaatttggggttgaattatagttacctgtccagctccttctgctacacagatcacagcagagccttttgtttcaataaggtacttcaaatgcttcaatacaccattaggcccatgaagattgaagggaacctttagatgcataggatctcttagagcgagctcatcaatcatgttttggaatttgaaataataacaaagaagtacctcaggaatcaaacagatgtcgacttgtccacttgctagagaggcttgcatagcaatgaaaccactgttacgacccatcagttttacaacgccaatgccatgataagcactatgtgcctaatacagaaggcccaaatagcaatggttaagtacttaaagcaaagagacatgttagtgaatatcctaaatgagagtacatgaaagttacctcaatgtaagcagagttaattgctcgttgagcttcttcaacagcagtatcaaacccaaaagttttatccatatgtaaaatatcattgtcgatggtttttggcacaccaactacagctacctttatctttcttttgcggcactagaattgaaagcaagaatgtgaatggtaaatcaaactagacaaactaaagaaaaagaaaaagaaaaaatatcttcacacgaactacacttagttagtttcaagtgttaagtaacgaacctcattgtgtatagcgttggcgccagcatgagttccgtttccaccgagcacgaaaagcatgttgattcctctctcctaagtaaattcaattttcagaattcagaatctgtgatctcataaagttccttaaggactgaaaaaaactaaatgatacctccatgctgtcgacaatttcactcacactcgggcctccacgtgaaactccaagcaaacttcctccagataaatgaatattctgaaccactttccttgataactgaaagcacaaaaaagcaaaccataagccaaaacagaaacagagattcgggttcctttttctcgaaagagcacaatcgaacaataccggcatttcagttagatctttatcagagaagcctcgataaccgaaaggaatccccacaatgttcttaacaccataaatctcaagagtaatgacaatctgcaatgtatccatacaacacaacaatcaaaggtctttagtaggacttcacacacacacacacactgtttctataatgccaaagtttcagatacaaactcacatgtctgatgacatcattgagaccagggcaaaggccaccacaagtgataatcgcagctttcacttcttccggcctgaagtatatcttctccctcggaccagcacggtgaatcctaaagatcccatcacaccaattataaccaaaaaccaaaaaagaaccacaaatccaaactcaaagaaagtccaaatgtttaccattgttcaacccaagaacagtcatgatcaaggcactcagctccagcagaagtaggtgaggagtaactaataacctaatttccaaaacaagccaaatcaatcttacaaagttcagtaaaataaaaataaaaatctgaagttaaaccttgagaagaactctatcattgttattaatgtatccatgccattcttcatcagaagggtaaccaccaacaaaatcttccgtcggagacctaaattatcaaaactccaatttaatagattttccaaaacccagaatctggtacctcaagctaaagtagtgatctgacctcatcttaagacaaaacgttgaacgaatggcttcagcatcaggtaagacatcagtgatgtgaggtatgctgaatcgttgctcgaaatctttctcatactttaatttccaatctggatcgctgagatcgatcgatgaagctgaggttttgctgtgttgaatctccgaagctcgcaccgagacgcgagatcgtgatgagggattcaccggagatctcgatttccggaggattaaggaggtgagtccgtgagaaggaacgagagaagaagaattgttcttgtaaggaacggagatcccggaactgatcgcctgagaaagagcatccatggcgaataagaagattccgatcggagatctttttgcttagttttctcagtcaactaagtttttttttggagggagtttttgccaaatttacaaaacaaaaaaaacacaacgacagtgttagatcacagtactttggctctttagattaacgaagaagtacgaaacaaaatctaacttcattttttgtctgtaatatttatcacgcctctaaatatgtaaaaatcgtcttcaacaaaattagtgactagaacttctgtgaataaatttcgaatttagttagtgatctttggaataaatcctaatcagatgctcttataattcgtaagttgaatctgattcgatgaaaagataatgaaatacttttcgagctgataaaccctttaacacaaaaaaaaaaatacttttcgagctgatgctttgcagaagtcaaaggagttgtgtattttgaactttattggggcaaattagtaaatatcaaaagttgtgcggcaatttcgtacatgggtgcgagtaaatttcgtttcttagatctactggttcggtatatttttcagttgtcactggtggaagcaatttgaatcggttctaatagtccgttgtccctgggacgtgttgaattcacatttgttgatcctactacctcagagttcttcaacatagaaactaaaagcaactgctattgaataaattgcaattaagctgtcttctcataaaaatatcaaaagataaaacattttaaagtaaatttgtaaaattcagctagtttctgtagtaaataggatattgagattaaatgcaaaataatgtaaaaatttgagtcttctgatatgactaagcaagaagaggtggagatcaacatgcttttatggtcatcagtcatccagttatgtatcacaccgaccttaaagcaccggcttgcaaagaatcttgcagagacgtgacagcgccgtcgtagtttaaaaaacccatgaaccaaaactcatgattgtctaccgaaatcacctgtatgtacttctctgcaggattgactatgctcgctgatggattcactgctttaagttgatgtaatggaattactacctatttaagaagaagacacaaagtgttcatcaatcatcaatgtagcaaagcttattacaatgaataagcaaatgcaatcgtatcggattggtttcgatgaaacaagagatgagaagctgatgcaatcatgttattactatcacaaaaaaaaagtccatggatttatgattccgttaacaagtccagattatttttctatccaaatgaatcactctacgaaggctccttagttgatgctactaacaaattataacgaaacattgtctcaagcattgaccagataaccagccaacagatttcgaacagttaatgatcacaaaagtaataatatggtgtcttcaaaatggctataattctgaaatgaaaggtgtaggacacattaccttgtaatagctccattcggtttgatcaccgtttttataggagagagggttgtcactacagtaagcaagtttggcactggatatatatagaactcccataactgggccagctgatgttgacaagtaacatgcaaaagaatttagcaactgttcttcgggatctgtctcaaaggtttgtcggaatatcttctcatatcctccttctgcaaagacctttgtactctgtgcaattcttcccattgcagcatccgcaaaactcggagcagttctcactgattaaaaagagaagattataagatatatcaatcagatagatcttgaatgaaaatgctagcgaatcaaacaagtaaagcacatccaatcaaggaagagatgaattgcgagttcacacacaaacaattgaaacgtatattgaatcatgttatttttctcagtcacccaaattcaaactttacgtccatactatgtaaatgcaggcattagacattttccctcaaactccattactcaaacacttacccaggaactcatctctatccataacacgaccatgtcccaagctgaaactcatatccacagttctagctcctaactcaccaaaggctgtttcttcttttttttttaatgttcatccaaatgtattatctaatccaagttcctaaaagcaatatagcaactctatctgttccggagcatctattcaatatttcacttctttaacaaaagatctactatatttgagcgcaaacatccattccaacaatgctaaacatagaagatcgattcaaacatgatatgaaatacaaaaaaactggagcagttctcactgactaaagtagaagattgtaagagagatcactcaaacgaatcctgaatagaatatgctagagaagcggacaactaaaacacacccaatcaaggaagacatgagttatagagttcacacatgaacactctaaacataaatttaatcgtgtaaactttcttaattccccaatttctatagttttagctagtcatcagacattttccctccacctccattgctcaaacattcaccaaaccaccaagaacatcacttgattagagtggtaattcttcagtccgcaaaaaggctttttgatctcaaaactaggagctaattccctactacttagactacatcacgaatgaccatgtccgaaggtcaaactaatatccagctcttaattcgtcaaatggcgtttttgattaatgttcaccaaaggcattaaaattccaagttccaaagaagtaacatggcaactaatacctaatccagagcacctaatttcaatctgatattttatttgttaccagacaatctactaaaaacttgactgcaaacatcacacagagaaaaaacagctttaaggttattccgactctcttataaacacttgtcatgggtcaagctacaaagtttgacagactgaaactgggagaatcttcttgttcaaatccaagacagagattttttaattactgtgatcacaaacttgacaatatcaaaagatcatcctctaataccgagcagatgtggtattaatcttggttctggagacaaatcgaaggcaagagatccacgtagaacaattgtgattctaaactatttatgaagataaacctgagaaaaaccgagatatttcttccaacacaatatgattccataactaaaatagtccgtttactattcttagcaagaactcaacaagatcaaaggtcattgtcttttaatgtactgcctaaagactgaaattcaggggagtgttctgtttgtaattaagaaaatttatcaacacaagccagtaagaacgtcccattttatagcaacaacatgttgaaaagagatcaaagaattgaagatcataaaaatacacttgagcactatcgaatatgatgatagttactcaatcctaaaaccagtactaacctaaacaccaacatacaacaaaggaagaaaaccataatacagcaaaaaaaatcttttatgtttctctaaaaaaatgtagactttgagtagaacaagctacttttaacaataccctatgaacaattcttgattccacagaactctaagcattgaatttgattacaaattgatattaaaaaaaaacgaaaacttacggtgttgccatgtgttcccggcaaggctctccgtcttctttgctgcttctgcaaccctctttccccatctaccaagcactcctttcacagtctccatcgtatctgaatccaattcacagacacagagagagatccacaaaaaggtaaataaggctacaatacacaatctcaattctcaccgctacgatcacaacactcttacctttcaacgaagcatctgaagtctcagctggagaacgagcaatatacggattagatccagccgaagaagacgatgcagctttctgatccggttcctgagatccagacaccaattcggggctccaatgtacagatttcttcgatccagacgatgttcgactcggagctttcaccggtgtcgaatcgcttcccttcgtctcgatttcaacctcatcggacaaggctatctcagtgttcgcatcctcgactcccttcgttttcgaatcgacgacgcttagcgatggatccttcaccgggacctcagtcttcactacggtatctcccttcggcggctccataaattggtctccaaagacggatcgtggcgagtacggcggcgcgtgagataaacggtttgtttgagtttgaattttgcaaggattggtattgggactaatggtatcgttccctttgctctttttttttctttggtaattttttttgtgttatatatatataccagtaaatacagatttgttccctacattacatatgatgataattatgatacctttgattttctttgttagacaattatgaggtatgactaagatcaatagggacatgaacataagagtctatgtttttttctatgtaagatcaatacctttgatgttttgaatttaaaaagaggttcaatgtatgcaatatattatcagaaaatgtttgaggagtaatatgagttgtatagacttcacacgttcttcacccaactacctactactgagattcacatagatttgatgaacggttaaggacactaaatctacaggagacaatatcacttcttttacctataatacattgtcatatagcactcggtcccttatgatagctaaccgaaccaaatttacatacttagcatctccaatcccactttaattttgtcctctaaaactctatgatatagtacattctctccatcctcattctatatgttactttaaaatagagaaaattgtaggattactctatatatagagtgatagattggagataaatcatactctattctagaggaaataatagagatcattagagtggtcaatttacaagacaatgagaaaatgataaaggaaatggacgagaactagatagtaattacgtgtgaagaatatagagaatttggcagagaaataataaattgagtgaacaaaagtacacttcttaaaatttaaggaaagtctaggttttatatttttggaggatcttttatcatgttttataaactaaataacgttggtgaattgatcaaaaaaattatttttctttttagattgtttgaaggtggaaaaatatttcggtagtcaatgatttgattaaaataattggattgcggttccaaacttgagtttcgttgaaattattttttttactttttttgcactaaaagatagattatatatgaaattatataaaagtggcgattaacaagataattccataaactaagccgacggataacatgaaatcttctgaaactaaagcccaagaatatggggagcttaccaacactactgctaatggagttttgttggacttatatatcagagtttattggtacaatctacaataataacatctaatggagttttttttttttttttttgggtaaatgacatctaatggagtattgattatttaatattctaaacaaaaaaaaatcaattgaatatctcgtgaagttttttaagcacggtgtatttatttagaggtttcaagatgttctattttctttaatgtatatagattataaattaaaatactaatcaataactccccttagatcttagattttttcatataagtgataacggaaagctactttgggcttgataaaatacgaaaagttacgaggttaggccacatccacgaaaagctagaaagagaggcctgccaaggcctcgtccaaacttgtactactaatcaaattaattaaaatttctttattggtaactttttaatatattcatttggtcaaagctggcaggaaaaaagttttcaacttataattttcttatgaagaagatactgatacaatgcatattaaggtcaaagcaagagtctaacaatttattattcaaggaatataaataattgttaggtaggttcttattgaaatgaagcatttcacaccgtaataatgatatagctgtagaatatgaacaatgcgcgtttgcttgactgtttcgttgtaagtttgtaacaataatggccaccaagtaatctgtcactagaatattgcaacaaaataaaaaccataaatataactataatgatctactaatttattaatttaattaacatgaaaatatgacagcttttgccagcccttgctcgtataatcagtccagataacacattacaacgaaacatataaaataacttttttcaacagaaacgattataatatacatctaaaataattaacagttgaaaattttgatagacatactatatatgaatatgaacttaaataatgacccatttttcgtataatgttaattatttactcgtaaacgcgttatttccacgaaacattaggcaaaactcaagttaatttacgcctggcattgtaacgcggttaaccaaaaagcaaattacgcagagtcaaatcatatctaaaaaccaatataaacataacacgtgtcaatacttaactgatctcagaattaacatcgttaagagaaaacacgtggcagagatctgtgtatccgtttggtgctccttcatgtagatgattcttcaagaaaacttcaaaaactcaaacacgtcaagtttaagaaagaaaaaagacaacaattattttaaaccgccattgaaaagctaagccatgttgtatttttgtatgtggttcgcatgattagtgtcacaccaataattaattattaactatttcccaaccatcgcgtatatatagagctctcttctctcattgttctacaccatcaacaaaaataaagaagagtttataacattaaacagagagagtttcaagattcagacaaagaagagataatctaaaaatgaattctaaggcaatgcaagctttgatctttcttggtttcttggccacttcatgtctcgctcaagctcctgcaccagcaccaaccaccgttactcctccaccaacggcgcttcctccagtgacagcagaaacaccttcaccaattgcttcaccgcctgttccagttaacgagccaactccagctcctaccacttctccaacaacatccccggttgcttctcctcctcagaccgatgctcctgctcccggtccttccgctggattaactccaacttcgtctccagctccaggaccagacggtgctgctgatgcaccaagtgccgcatgggctaacaaagctttccttgtgggaacagctgttgccggagctttatacgctgtcgttttggcttagagagcttttgagtttggtggatttggatcctctgctttctattactgttttattttaattacttcttctcgttcatatttgttatttactactattatcattttgacgtggacacttgttgttgttggggatgagatgaacatagagacaatatggtgtaatatctattcttttatataaatcaaaataattcttttatatgtactttcgctttgttatgtgtttttcaataacaaattttaagagcgtagatgggtcgttgtaaccatgccaggcccttccaagtaacatgtccgaaactaagtcgatccaacctttaaaactaggatttgggttaaatcctcatctttaatatacgggatgcctaaattgtcgttggcccatatattgaactgatattgtcttgctcatgtagaggcttgctcatgttcgtcaaccaacacaagctcgttagtaaatagcccattatattctagtgggcttaaaaagaggactcgcacatctttcattccgtattaatgtttttttggtaaaatgtgaaacatttatatcattaaattttgacagaactataagataaacaagtagcagaaaaaaaaaaactatagaattagcaaaaacggaaatctaaaacagaaacgagagaagaaacatcgattctaaaatatcaaattcagaaatttgcgtgatttccacaacttcaagttaccaagaagctgggatttcatcctatttgccacgagcaaaccctaacagaggtcagtactcaaagcttctagataaggtgtctataacttctccacaaactaatgcaaaaatacgatgacaacagtagactaatgcacaaacccgacagttacaaaagcatctacgggtaaccaaagaaaccacctctagtcaccattcttattacaaaacaggaaccatctctcacggacaagtgatgccacaaaaaccaatgcgccgcctctattcgtcccttgaagacttcactcagagaaaacgcacacattcaaaactgttacagaaaatgaaaaaacaccaacatcgaaccaccaacaccaacatcatattttgtggattctaagtttctttatttcttccttctacgaatttaggaagttacttcacacttttgtttacatgcaacataaacaaaacaaaacaaattaaaatgttacatttgagattttttttcatatatgaattttgtgtagttcgatgttgttttctctaactaaagtatctacaccatgcgtcatggtgaacgaaaaactaatctttgataccaaataatttagttaataattgtatagccgccacaaaagatatttatttttaaagttaattaggatggcataaaagttttgtgaggtctttgatacaagttttcaggtaatgaaatatgaatcatatataattttggacgtatattaatatgtatgttaaaagggaatataattgtaacaaaagccttgatgattgatgagtaaaaaggcaaggaacaagaacagctaagtttgcccatggaattaccgaccaaaagttcagactatgggatgtcacacctcaattttttccctctctcttaggccttagccctttcataggttcagaatttaccttgagttaacaaaaaaacaaaaaacaactaataaaaccaaagaacaaataaatatatatatagttctcaaacgaataagattaatttcactatatatgtatgtaactttgaatttacatatcttctttggtaagtaatcaatctctttaggttaagtgcttgatagacacacgaaattccggatgagaatattgttaccattatgatgaccttctaaagatttagtagtcatagtcgtgagtgaattggttggccgaacatagcaaaacattagtagtattttaaatatttgagagagtacttgtttgttatgatatggaaagtttgggtgcaaaaagattagtagtgtactagtgtatatgggaagtccaaattttcgagcattctacagattggttaattggtggaaaattaagttgtgttttagagtattctacagatagattggtggtaaaataagttgtgctttagtgttactttaacatgaatatatgtgaaaaaacttagtaaaggtttttacggtttaatgttattgctttgcggtttcaatcattactggttgttgtgaatgttttacatgtacatagcaagactatccaacccttccaaaaatgtgggacatttgtttgaaacttcagtatgagattctttagcacagaaaaaaatgatttgtaggtttgaaaaatatgtagtagtgtggaattttggtgttttgaatttcttcattttcttagtgttttcatatatatagaccatcgtttcttcgggttaatggttaagatatttctaaaataaaatgatatatcagtatcatatataattaaataaaatgattttgtatatgactaacatggagcacatatatacaagtagagaacaaaataaaggtgaaggaaaaataccaaaacgacatgagtggagaaaccaggctagcttagacacaccataataaactagttttcctttttgttggattttggacccaaatgcactttttggttgttgttgtaattttaatataaaagattatttccttttatttggtaaatgatttataaaagctcatttcttgcttttcttcttttgtttttgttaacttactataaatttataaacataataagagatacaagagggccaaaagaaaaaagatatatatctagtgtcatagctcatgctttatttttgtttcttctctcttctttttgttttagaatcaacatataattgatgaccctagagtaattgaaattggaaaaggcaagaggtatttgtagttaaattacaatctttaaatattttttgaaaaagattagtgaaataacatgcacgagctgtaacgaggaatctagtattagataaaatggagaattcttttagtatttattttgtgggaactttatttgttaatcttccaatagatagaaatcagatttatttaatatgaaaaatttggagtctaatgaaagtggtagagatctaatggtgtaatcattatgcaattatacaactctttctgtcgtacggatattattaatatacatattatgtttgctttcttttttattattgtataagtaaaatttgtttttctttaaatgatttttagcagttgaaaaggcaaaaagcgggaatgttgtataattatttgagaataatttcatccaatctgtatttttttggattattgttctctttttctctttttattttaatatttaaattatactccaacgtcacccgtagttcgatagatgtggtatcaaaagtttagtttagttttcacattcatacgtatgtgtatacagttccacatataaaatgaactagatcaatgatgttaaggaaacgcgtgcgcatcgtatgaacatatatcttttagcatcaattctgtatgttaatgttcctatagagagttattagaggggatagtgtataattcatatacttgtatatagtttaatacttgtaatcttatttagtatataagtgtcaatcaaaaaccaaacgaatttacatagaaaaataaaaaccttgtaatttatttgcccatttttcaagtttaaattattataagtcattgagagaggtttaacatttgcattcctttattctttttaccgatcatgaaatatttgttttttttattactaagtccatcatgaacaagattgatagtttgatactacaaatacgtttgtatgtatatagttgatttaggcctcaatattctcaagtaacattcctcctaaaaagtgaatatatatacgaatgtcaaacaattattcaagctcagaaaccccaattatttaacatctaaattttatatgctttattgcaataataaaaatacaaattactaaatagtagttccacctattccgaaagaatcttttagggtgagtgacaaaaacccaacacgcatcatactttacaaatcagagctcataaattgcctctcattacccaaacataaatattttaaaaatcaaaataaaaccaaaagcgaattttaaacaattaaatagtaatattctaaaaaaagatactcgtacgtaaaccctcctctgtcgccctatataaaccctataacacttgaacaccaaatcctcaagcttctgctttttcttcatctttttccacttttttttctcttgttttttgcttcatcagaagtattaacaatgtcaaagagcaaagtcatagcttcaatggagtttcaatcgacggtggtagcaaccgtagactgccagaaacaagtccggtcatggcgtctcctccgctcattcattcagcttttaatcccaacttgcaactgcacattagtccaagaactcgaacaagataacactaacttgagaggcaagaaactctacaatgacatcaaatcacgcacgtcttcctttcgctcctcttcgtccctttcttcatctacagtcacaggaacaatcttcggataccgaaaaggaaaaatcaatttctgtatccaaacaccaagaaaatcgacaaaccttgatcttctcctcgagctagcagttccaacgacggttttagctcgagaaatgagagaaggagcgttgcgtatagtgttagaacgtaacaacgaaaaacaagacgacgactcttttttgtcaaagccattttggaacatgtattgcaatggaaaaagagttggttatgcgagaaaacgcagtccctctcaggatgacatgacggcgttgaccgctcttagtaaagtggtggttggagcaggagttgtgactgggaaagaacttggccggttcgatgatgaattgatgtatttgagagctagtttcagacgagttaatggttcgaaagaatctgaatctttccatttgattgatccagctgggaatattggacaagaactcagtatcttcattgtcccatcatcagtctgatttgattacccgtggagatgctcgtacataagagttctgttttcaagtttctttccttttattttttccttgggtctagagaaaagaacttgtttttgagtcgtgctaaagcttttggttttagctctggctttgtatgtaatttacataccatttcgatagtccattgatttgagttttaatttttttatcttgttgctatcatttctgtactacataaataatggtcttgtctttaaaaaaactgattatttagagacaaaatgagaataattcggcaaaaaatagatactattatactaatgttcataatgcaattaatagactaaaataagtagtagttgacaaagaaggaaaaacaaataaatgttactctcaaaatattccaaacaaatttgtttttttcgtgactggaattctcttaattacacaacgtaaatgttagtaacgatcacttgattactagaaaacgaattctcaagtaaaatttgcagagaaaatgccatttaaaataattctaatgataattatggaggtcaaaaaacacaatatcagatcacatgatttaggcgccaaaaccacaactaaacaacaaactaagtcactcaagaagccgacacgtgtcgtctcttaacgtaatcaaacaacggtcaaaacaacacttaaggagtagtaatgagtggaaccttaccagaaattgataaaccatagcctttaagaccaacgtaatgtgctggattattcgtcatcaccttcatctctctaactccaagatcccttagaatctgcattaccaatctttgatcacacttttgctttttaaaataaacagtaaacatagtaaagattcaatgtttttgttattacttgtgctccaatgccgtattcccgtgaagcaacgggaaatgaaacaccctcggcttgatctgaattggtgttgtaagtacgaggcttgtggcttagatcaatgcctttactttcaggaccacgtaagtagacaaaaacacctctcccattttcttcaatcagtctcattgcaatcgctaactgttttccaccagagctatttccgaatatatcatctgtgatacactccgcgtgtactctcacgagaatatccttcccatctccgatttctccctgtattttaatcataatatggtttataagaaacggaagtctctcatggtttcaaatagggtttattcttaccttgaccattgcaatgtgctcaactccatcaagtaatgacttaaagcaatgtgctttgaatggtccccacattgtcggtataggcgcaaccgcagtaaactcaaccagtctctctcttttccttcggtatctaccagaaatcaagaggaaaacatcagtaacagagggagttgagtgttcttaatccaaacaccagtagctgatcttgaattgaatgtattgtacctgattaaatcagcgattgaaattaatttcaagttgttctcttgagcgaattggcggagtcttggtaatctagccatggaaccatcatcatctacaatctcacataaaacagatactggttctaaaccggccaacacagtcaagtcaacagaggcttctgtatgccctgctcttttaagaacaccaccttctctgtatctcaaaggaaaaatatgaccaggacgattgaaatcttcaggttttgaatcttttgatgcaagggttaatattgtttgcgccctatcacgagctgagacacctgtggatgttcccttttttgcgtcctggcaaatattttcaacattcttttcatcacacaccactaagagtcttgtggttttctcaacaccaaagaaaaacatacttttactcaccactgaaaccgtgaaggccgtgcggagtttttcctcgttatccttacgcgttaccattaaaggaagctctaacctctccaagtcttcgcctttcatgctcacacacacgattccagtcccatgctttacaacaaaagccatagcttcaggtgtagccaaagatgccgccattatcaaatctccttcgttttctctatcttcatcatctacaacaactaccatctgcaagaaaaacgcaaagctttctcacttaagaccttccccttctaataagacagtaagcagacacgatgctactattacaaaccttgccatgtcgaatatcttcaatagcttgaggaatagacgcaaatccatcagtaggtcgatctaaatcaaactcttcatcctcaacttcaggagaatccattgttgtaggaatcatttcagctgctaatgttccaaacgaaaccaaatctggctgtaactcaatccccattgatgatccattactcttagaagaagagaacacatctccttcctcaggtatcactctcattctaacattaaacttcttcgatatgatcctaggatacaccaagctcgttccaaatggttttgttcccttgacaacatcactgaaaaacccatgaagacaacataaccatcaaaacctaaatacatagatatgtgtttcaattgaatccaaaatcgaatcataagcaaacgtaatttcaaattccgaatgataaacagatctaatcaaaaactatcaattcaaattcagtgaaacagagagaaatacaattcaatttgattaccgggaaggcaaaagatgcgtcgaatcgcaccggagagtaagcgacgccattttcaccggagttttgaagagagagacgacgagcttcgaagagactgaaccaccgccgtagaatatcactgtgtgtgtttttcgccggtgatattttttggtgtgctgacgtggcagttgtatagatatttttccatttatgggtaagcacgagcggaacggcgtcgtttaggaattgaatacgatgtcgtattaggtggaaacacaaatccccattgagatcatcttgtgtcggtgccttgactcgttttatttacgtttctattacacaaaacgtttttgattggataatgattttcttcaccaaatttacaccttactttacagttttcctcttttatttttttttataagaatggagcattgtatcaaaatagaaaatcgagtagattttgttgcatttttttttttttttcttcaaacaccatttatattaagttatcgggaagagactctccgctagagagagccatttaggaaccaatgtgcttacatgggaaaaaaggctattgcgagcccgagctttcttagctaaacaatctgctcgagtattagaactacgagaaagaaatctaatacgaaaagaagggaaaaaacaaactaaagaacgatatgaagccaattccgctgcaaaagtcagccaatcgtcttggttatcaaggatagcaatcaagtctgagcaatccgaagcaaaagtaccagaagtatcaccaatagagatcatgcactccattgcctataacaaagagttaaattccgcatgaagcggtgataaatttcgacgagtgctcttaaggccaaggtggatgaccaagtcttgtcgaacaagtacccaaccatgcccgctcaatgtgtcatctacatgccatgatgcatcgagttgacattcagggagcaaggtggacggggtctgagaagaacctacgaacacgattggacgagtggaatcatcctcttttagagttgcttgtttccaaacagctgtctcttgaagtgccaaaaccaaagtttcagggggaggttccctgaagttctcaaaaacaaaacgatttttacttttccagatataccaaattatccatggaaagagttccaacaccttttctccaattccaaattctcggtcacgccaaaaaaggaagtcgaaattatagaagagagagtttctagggaaaatattccctgaggtaggaataggcgataaagcccaaatctgtctcgaaggtggacaatgaaacaatagatggttgattgtctcttctacttcttcgcaacggggacaacctttatctgtacccatatggcgatatgtcaatctttgacaagtggctaaacaacccgagatacattgccacacgaaatgcataagcttccgcgtagttttaagctttcatacttgtgcctgaagtgccgaaacacctggtccctgaaaaggggggtcacaagtaggacgagaaagatctctcgcgacccaatatcctgacttaacagtataattaccggatttagtgtgagaccagctaaagccatcactcaagtaggtacgacttgggcgaatccctaaaatgagtggaatatcaacgggatcgatcagtgcttggagacggtccaatttccacaaatttgtgttttggtcaattaaatcattgacatagagtagagaatctcttatgttaagaatgctctttgcaggccgcgctaggatagtgggaatccatggatctttccatacgcgagtcagcattccagaacctatggtcctccgaaatccaaagacaagaagaggtttggcgcattttcacctctaaaataaacacaatttcatgttgatattaaggttgttagtttcgatccaaaagaattattttgactatagttaagatgatgttatacctaaaaaatataatttacattttataaagaaaacaaactaattatattatcaatggatgataccggatataggaacttataaggtgaaaaaaatcaaagaaccaaaaacccaaaaactttccaaatatataagagaatataaatatgttttggagaatcaaaagaacctaacccaaataaaaagaaagcaaaaaactcactcttgttgctgtcatcgaggcccaacagctcttgtctcatttttgcattgccacgaaagtcatcaccctataactttaatttataaattttttaatgggttagagaaaataaaaaacgcatataatccaattattacaactttaacaaattaaagaagacatgatgattagattaccatgcgaataagacaaacatattttgtaaaatgttgtcaaaaaaatatctctaaagcattcatgattttagcatttaacaaaataattctgataaccaattttgttacacactactataaaacttctaaacacaatattgtgatgttataataacttttacatggtgaatagacaatttcaaaagattaataaaaagaaaactcgattattcaatttttaaaaatagattattaatttaacacagagattcctttccacgtatagcttgagtggagctgagccgattagtataagccgagccatattatatccgtttgagattaattttattttaattgattttttaatcttctcttacacgagttccagtgataccggaagaaacctggaggtaactgggtatagccggtggaccccctcaaatttattttaacaaaaaaaaaaaaatcatttacaaaagaaaacacccaagacaatatctacttaaccatggttactttctaacccaacctttgagtttatttaaactgagagaaagtgtgaaaccaagcttgttcatatggaaaacgctcatcaacctcaacaatctctctcctctctctctctgtatatagaagaatctccattgtctttaatttctctccatttctctttctctcttccttcaaagttttctcttttcttgatgggtttaagagagtaaagatcatcaagtactatgcattaaattgagaagttattaaaaatttcgaaagtaattaaagattgttgatgatgaagagattaagtagttcagattcagtgggtggtctcatctctttatgtcctacaacttccacaggtacttagctaattttctaaacaagtcctttaattaatctcatctttgtttgctaattgttcttcttatggaattacagatgagcagagtccgaggagatacggtgggagagagtttcagtcgatgcttgaaggatacgaggaagaagaagaagctatagtagaagaaagaggacacgtgggcttgtcggagaagaagagaaggttaagcattaaccaagttaaagctttggagaagaattttgagttagagaataagcttgagcctgagaggaaagttaagttagctcaagaacttggtcttcaacctcgtcaagttgctgtttggtttcaaaaccgtcgtgctcggtggaagacaaaacagcttgagaaagattacggtgttcttaaaacccagtacgattctctccgtcataactttgattccctccgccgtgacaatgaatctctccttcaagaggtataaaaattcaacctttttgataaaagattgaaacttttgttgattcaaagttaaaaaaattgaaactttttaccaatcttgagatttacaagagaattgaaacttatggttttggtttgatgcagattagtaaactgaaaacgaagcttaatggaggaggaggagaagaagaagaagaagagaacaacgcggcggtgacaacggagagtgatatttcggtcaaggaggaagaagtttcgttgccggagaagattacagaggcaccgtcgtctcctccacagtttcttgaacattctgatggtcttaattaccggagtttcacagatctacgtgatcttcttccattaaaggcggcggcttcttcattcgccgccgcagctggatcttcagacagtagcgattcaagcgctctgctgaatgaagaaagcagctctaatgtcactgtggcggctccggtgacggttccaggaggtaatttcttccagtttgtgaaaatggagcagacggaggatcatgaggactttctgagtggagaagaagcttgtgaattcttttccgatgaacaaccgccgtctctacactggtactccaccgttgatcattggaattgaagctgaaaacaccaccggaagagattttggattggattagatgctcttttcttctctgtggaaaaaacagaggagggcaaaatgggaataaagttaaaattgaagggtgaaagggcaattaaggaagggttaagtctgggcgggaataatgatttagggtgaatttgtaattatgctttttctctagtgattttcgtgcacttcttgtaattaaggatcatcagatcaaagagaaattgagaaggggttaacatgtcaaaggcaaaaattcagcatgggctctttaaattacaattgacccttgaaacctaaattataccacttctgacccttaaatcaatttttgaatcataaaactacagtgtgacttcgtgtatttagttctagtgtattatgggatttttttcaaagagaatgcacctcaaagtctcagctttaagtctaatgtttgggtaaaaaacacaccgaacttcagatccaaaacctcttgatagaaaaaacaaaatagatgtgttatacactttttttttttttttgaatctgttaaatatacttttagtgtagtttgttttgtgatttgaattaaaactttagtataaatcaatttattacattttcgattaccggaaagtattcatgtcattaaggtttatttagttcaaactaatttttttatttcattctgtcttatttgacctataaaatctaatttagcttaaaaaggtattgtcatgtaccactaatttataattactaacttatatactttaattagtgatataaggtgaaacttagcagtaatgacaacaaataaaagatgaagatatatacttaaaggcggtaaaagatgataataagaatccgaccaaaaaaaagatgtgataaataaaaaatagattgtacaataagttttaataatattttaaataatcataaaataaaaagaaatttgttttaatattttcttaccaaaacctcaacataatatagtaaaaagccaataatacaagactttgtaccgtcagtttttttatgatttataagacctagatttataatataattcaataccactgttatttactatagctttgattgataatttatttgggggagaaactttgacaagagaattggcacgaggttatgaagatttttggagaaaaaacattgacaagacgaaaaagttgttgctaagatacagcttccaaaatgcgatttatgccatcagaaatgagcgaaacaaaaaaaaaagacatggagagcaaacttcccatctggagatgctagcaaagataatagataaacatgtttgaaaccgtctaagtaccatgaagtgtgttagagtagaaatgcatacaagcaaaatttaagtctggtttgcgtctatgcactagtgaaagaagttgtgtctcatttaaaatgtttcaagtaattggtaattatttgtaaaaatgtgtatttttttgaatataatttaacactaaattcaaaaaagtaaaaaataatttggggtatacctcttagcatcttatagtgataagttttttttcttaacaatatgcattatacagatttaaattgatgtagtaacacaatgacttcattagtaaaaacctaaaaactacttcattatagaggttaaattcctcaaaactgtataatgttattatttaaacactatcattaggtttgctgttcagatttgatttgattcgaattcgagttgtctcggtttgtgtaaccaacagtgtattgattgttaaagaaaactaattatgcttaaaggtaaaccggcaaagctttggaccacctcgaataagatcattataataataataccggaatcttctaattaattagaattcttaatgcatctttgattctttatatcttttttactgttagatcaactaaaacatgtcgatgatcagatcttcctataacattactgtgttagatttaacagtacgatgtatataatttcctgtgttttatattcagttattcacctttctatagtttaatcacaaagcaggtttcttgtgattgggctaaagacacatttatgttgtgaattgtttgctcaacgcatacaatatatcccaatatacctagagtcgaagatagggaatagagtctagctaagagatactatagtacatgctacatcgaggaacatagataatcaatttagactattaaatcattatggaccaactatcttcaaattttgaatatctaaattgttgaaatcccgactcaaagttacatcaaattagcacttataatcactcactaaaaataatgaaataaaaatgaagaaaaaacttgatttcgatattaactacttctgaaagaatacctaaatctcgacctcattgtagaaatttttttgtaatagatttttttctaatctttctgtttttctttctctaagagcatttccaactcatatcactatattttatttttttccaaaatagagtaattttaatttggagtttgggttttactcaaaataaagttttgagataaacatggagatagatcggagatcatctaagaaaaatttgcatgtggtccaaccaggggattgtgaaatcgaacaggttacaaatcaacaacaaaaccaaatacctaattagtttggttttatgtttattcaaatatatttttgtgtgtaggtttaaagattatgcataaccgagatgttgatactcgataaaagttttgatatccgaaaaatagtttttggtttggtttgcaacttaattttttatttttttaagatattgagatatttattttgaatcagatatttagcttttcacctatttttaaatggattgataagatatgtttttataatataactcagcattctgatattttgagttaggtatttcactattcatatattaaagaccacgtgaatgtgatttggatattttacatttacacgttccataacatttaagcaagaaaatagatctaacggatccaagtttctcaacgcattggataataaaatatataacacatgaaagtataacaagttttagtgctcaatcctaacttggaatgatgttcatatgcatgtttcataatacaaatggtttacaatgtctatggcgaacactggtcgaattagaatgactatatacaatgttagagtatgatatgggatagcctatagattttgcggccaaaaaagtgaaatttgttaaagtagggattgaatttagggttgtagaaaaacattgaaggataaaagtaatatgacaaaaggaggaagaagagaaagggaacacgtgattggacatcatatacatcttttctttcctaatcccacgacacgacatatctcttctattttttcttcgtttatagaaagcatctaaagtaatttttccatttttagatatatatggagaagtcaaaaaaataaataatgaaagaccaacaactatgaaatatatatgaatcgatcggatatttattttagtttgaatatcttaccacttcaagtcttaaaccattgaaggtcaagtatagtgatggctttgccatttataattttgttgaattgaaaatggacagtatgttttagtcatttcactattattaatgacaaataggaatcaaataattcataattgttagttattccatcgcaattaaagtccaagtaaacgtacatatggtactagagttaatccatcgtaactttcatatgtttttgcataatataagatgtttttttaatccaaaaagccaaccctcaaaaaaaaaaaaattaaacagaaaaacaatttgcacaatctataatggttcacaaaccaatgtgaaacatcatattgagaagtaacttagcatcaattctaagaatagatataaaccagaaaactataattataagaaaattatgtagatgataacatattgataatagataatcaaaatttataagatcagaatccaaattgtgtaagaacctctaaagtgtataaatttaatatggtagcagaaaataataacaaaaaaaatcagatttgaaagaaacttgcccccaagaaaaaagaaagaaagaactccaagaaataaataaaaagtgattccattttttgtatatatttgttccatggataaaataagggaataaaatacagtaattggtggatgggaaggataaatcatgaaggtgctttttagagaaaaaggtcgtcagtcgtgattgtgcgcgtacgtgaagtggaagcatgaagcatcatttttagtgaatctatccaagtaatttttttacagaaataaagatgatgaaaccttctgacaaattcagaagcttttctcacgtcatgaatagcctctgaaattgatgcaatctcatcttaacaattttacacagtttttctagcactatttatatcatttttcttttaccatacttgaattgtttttctagcacactagtaagagtagttaacaaggattgggatttgtatcataatagtttgtagtaaaatattgttgttttcgaaataaatatacttaattaattttagatacatacacttgttaaataatccctgccatacaacaaaattatttaatgatgaattaaaatatcaaaatagttcatccattgtagacaaaaaaaatattaaaaaaagtttatcaaatttgattattatacattgcgattaaaagtatttgaagaacgtagttgacttcattcgtgtggtgacataaataaaaataattggagatgttcggcaactgactgtccaattcaagcgtttctaagttctaactaaatgaatggtgacacaaattgatttctttgttacgactgcatactaaagttgttcaatccagacaaactaatccattttgaactgaaatatacttaaatagattgaaatgtaccaaactattcatttttgtgtaaaatatattgatgtttaagagtttgtttcacttcaatacacatcaatcttgacacaaccaatataaaaaaagattaggaattagcagaacaagtcctaatctaccaaaaaatatagttaaatatgagaactcaaaacaaaaatacagcaaaacggattaagaagatgctctctcatcaccaaactatcaattctacattaggttttaaccttaattagtaaatcgaaagtctcacaacccaaaaatattgaaccggattgatcctatagtttctagtctgctactctattgttacacctcaaaataaaatacaaaaatatgattccaaattttgtgatataatatatgtttctaatataataataaaataaaataaaataaaatttcctttttattgtatactgacaaattgccaaaatgagggcccacactgtagcttctttctttatacgaaaactaaatgagaaaaatagggggtccacatacccatgtgacgtgggaccttaaacgcatcaagaagatgtcgttttcttcgtagccatttgtcactatcacttttgtaaatcttacattttaatatattttatgtatatttatttgattatagtttaaataaaataaataaacatcgcaggaaggctataaggagaggaggatgataggcacgtgtacggtcccctcttgtttatcgttccgattgtcgacagctcaactaaactaactattcacagccgtccatttcaccactttatttatccagtcatctcctgacacctcatataaaaaagaagaaaacagactactcttctactgttgacgtagatcaatacttttgtatgtatgtatatgtatatattattaaatgatttatttttgttttctttcttttttgtgtcaaatactaaaaatgaagtttaatagttgatggcatgagaaataattcataatttggtttattcaatccaaattatgaactatcatttttttatgtcaaaccaaagtttttttcttaaaggttttaatgtgaaaataaaatcatacgattgtcaaaaacgagttttgcttacaaatttcagagtaaattaattacaactttttttttgtcgaaaattaaccagttcttacccgatatatagaaaaacatacaattagttttattgtattaatccaactaaaaaaatcataattgactaattataacaaaatccaaaagagaacccttatttttgtcaaaccgtgtcgtgtataattctaaaatgatcgtatatagaagtttctaaaatgacactaaattaattaagcagtagaatagatccaagaaatagtcttttataattggaatgttgaattcgacgtcagtcatataaaaatgatctgattctcgttgaagcatttgattgaacatattgcattgtgaatttatctttatttgatgacccttgttgttataaataatcttgcctttctttcttcttatagtctaaagctctattcttagacaaagattgtggttcatgcattctttctataattttttttttaatctttctatagtttatatcatgttgataaaaaaaaacctataaaacccaaaaccggtttaaaagtaaccgattaatttctttatggtgtcttggttttcgatatgctttagtaattttaaatgttttatatttgctgattttatagtgttaagttattttttattcactttaagttttaggtggcgaacacttgcgttatgtgtttcactttctcttggcaaatgaacactgagaatcgtaggatctctatgaaccctttttcttatttttatagcaaagcatcttagatttgattatttaaataaaagttataatgatcatttggtaggttttcatggcttatatagttaattagtacctaaaaagaaccaataaagtgtattccatccactagctattgtttctacgtgattcatgcttttgcatggtgttattaaattcgcatcataacaaatcttgttaattagtagtgaaaacaaatcttatctactcaagtactcatacttaatttgattccttcgttggagaagcccattataatttataaaccaaaatagcccaacagagatgctgacagtttaattcgttgtggtgtgtttttagacatctaaatatttattgatttaaatttgttacaatgtacgtaatcaacatgaagtaatggagatatagctatatatcttttggaacaaaattatgcaatcttgtgaagaaaaagtttatcaaagatattaatcttatttgctctattttccaccatttctattttatttttggaatccaattaagcaactaaaaaaaaacaaaatcaggtgttgtggtgttgtttccaaacctgcaacttataagtacataatatatgaaagttttgtaaaaattaaagtaaatggtttaagttgcaatttttaaaacaaaagtattaatactaaactaaaaaaaaaaattgaaatatttttttagaggaataatttggagtaaaaccacttctgttatagaattcttctattttagaacaaaaataggaaaacacgttggaaatggtttaagagactaaatctaagttaaccaaacttaatttaatgaaatataaaatcgcagcaagaaaatacgttgttaactagctactgcaaagacttttagcgacccttttttatatattctgtaactttcgtataaagactatcgagacctaaactattatttaatagcactaaactattactagcaagaaaaaacaaagaagaaagagttgagaaacttgtatctaattaacacataaaaaaacagcatggttactgaaaagaaagggaaacttaaatctaacacaacatgtcaagttgtcaacgtgtatgcaaatgtttactggtaatatgattttcaaagaaagaagtcacgcccaatatgagcgatgaaggatttttaggttcggttagaacttagaagtggatttaaaaattaaaaattaaaataagaaaatgatgcttggaaggttcaaaatatttaccttatgagagatgaaggattttaccactagtccaatgaggttttagtataaatcgaccgcttaaaactacattataactaaaaccataaaactaaatttgagtctggtagtaatcttaaatttagtgttacagttttgtgtagattattttttcgtttttttcttgaagaaagctttaatttttatcaaaaaaaaagaaaatacatttatagaattaacaagatattttcgtccaatcggattattacttaattacaaattttgcattatgctatagttaaattaaaatttgacagttttagtgtacttatttgcagaataagatttccaaatattttagacacccgtgttttcgagggcccgcttgtagaaaatcaaaagctcacaatagcatcgatggtgaaacgttttcaatatttcaactaatatcatatagtaatatttaaaaaagcatattgtcctaaattttcaaagatgattgtatattttattcaaagataaagatatacagctttgcagtcacattaatttatcaaattagaaaatttgagatgtgatcgtaccaatggtctctttcaagacttttaactctgaaaactttcaaaattctaatttgggaaatttagacttagttgcaaatattctctaaattgcttaattcacagtcaattttcatcgaatttatttttttagtttcttgttatttaatatacaactcaatctaagttaaaatacaaaaaaaaatgattaatcacaaagtttaggtaagtgttaaaaaaaattgaatacgattagtaagacccattgaaggagacagcttatacggctcgtatcggcttaaaagattagctaagtatagtataatttgtcttgtctcgaagtatatggcacgtgtcggttattgcaagtggtccagagggaatagaacgagtcagcaattaatgggacctatctctttttttgtttgcagatattcaaagtcaaaaaattcggccttttaataaaaaaaacatttttggccaaaaagaaaactttattgctggctaagaaaaaagataaaaactttatcatatgcatgtgtctttacatatgcacacaaccagtttactttatatgtagagatttactaagagttagacgtgattaaattctttctacttttttttttttactttaacatccaatatatttttatcaatttagttgtataattccaccgcaaattcagtattttaacaagtactatacattatagagaaaagaagaaagaagaaagaagaagagtcgctgtcgctccggtgaggatttgtctgagagcggcgatgtctcgtgcttgagaatgctacttccctttgctgtctccatcaacacttcccgcttcccacacgccacgccaatatctctcttttctatccgttgatttctttgacttttccacctcttttttatatgcattttaaaaaataaaaagaacttacaaattttgtttactatcttgcggaaaaaagtataaacatataaaacaattacaaaattgaatttttttatgttttcacttttcactggtatcttaggtcagattctgtaaatttatgtatcttgattgattatcgttttcttaattgttatatcaatacttatgcttagatttacgtataaactactataatgtataatctcatcgaagttaggataagcatatagatatattcgtcaatccccaaaaatgcttcgatggtcaatgtctcacagtctcagtgaatgcaacaaagttacttaatgagtgaataacacagaggacaacagaagatctacgttaaacacggatctagtaaacgtgtctattatctcatgaatatatcagtcttgtaaactttttttttatattaattgtgtgtgagaaatcacaaaacctttattgtgttgaatgttggacacaaaaatgtggtatcgtaaaacaattatttgatgggctttaaacaggccctttcatatttattgatgggctgaagctcaaataagatccaaatgaacagacaaaaccaaacagaaaagacttctcaatgtccaatgaagaattatggagtcaacttgttatgtcttgcgtatgtttcccaaattttcttgtcctattctcttatggagtattagagtaatatgcttattgtatggtttttcaggttcacaaccttttacccaattcacacagaaacctcttttcttgaccacattggtaatgacactagccgagcattcaagatatacgtttgtcatatataccttgtatttgattttgtctctagagttgactagtttcttacaatcactgaattttcctctattgtttatccacatgatgtattttttttgcgataccatgtagattttggctattgctacttccggagagctctctctttgtttgtgaatttgcttcatccttctggtgaaggtatacttttcatatcctctgcttcttcctaatgctgacctaactaaaccactcctttttctccacagctcatttacaagcatcctgccaaatgttggttctctcaaattctgattccaaacctgtacgcgttcgctgattcaactgtcatttcgtttcataagcctatgacctacctttaagcgttcgcgttcgccagatgactcgaatctcccggaatatgaacccgtgcaaatcctctgaccagcgactagcggaacagtttggaatcacacaaactatttctacttcgactcaagaaaataagaaggagcaaagcatcaaagactagcattggtttttgcacacaagcttaacacagagtgtaaatggatggtgtgatatttatgtaccattttcataaaaactgagacttttgtgattcataagactttttcatctaaaactctctgatgatagataatctacacaattcagtgaaattgccagattacagccatagccattgattcaaaagcaaattcctttggcaaaaacagataattataagaatcaacccagaatattcaattcataattaagattccgatccacaaatatctcatacaaacaattctgagagagagagagagagagagagagagagagattcagaatcagacctatttcttagagaatttcttcttcgaagcaacactgacaacttctggtttgggatgcttctcggcttcgctcggatctaaccatttgagaggatgaagattgtagaaaggccaattaggtacagtaaccaaagtcgtgagaacaacaccaccggcatagatcagcatcatcgtcctgaacgattccgttgtgtagccaacaaccaccgctacaacgccggagatcaccagtaagatctgcatcagctgctccaccagtttctgtccttgccaatccattttcttctacacaacgaaatcaaaaaccattagcgatttgaatccaaagttaaacaaaagagagaatctgagaaccctaattgcacaaacctttagcgatctgatctctcactgaatctgtaaacctgattttcaacaatggggaagaaaagaaaggactcttgacatttatgagctaagaccacaaaatcggtttaaaagtaaaccggataaagtggacggtcagattactctataaccgggtgaaccggcggtttttaatgtgccttaattatttcgagattttgtatatgtgcaaattctgaaaccttgaaacaaggaatatttacatttaagtttctttgtgtgtacctcagaattagaatgttgctacttgtccagtccataatttgtttattgggacaacaacttcagtgattagataatgtttactattttatagactggtgtgaccagattgtagctttagcagtgaccagtattcataaaccaaaatcaaagttttggagaaccaagatccatggcatgtagctaaaaagatttgcatcaatttagaagtcataattaagatttcttctctttactaatgataattcaagatacaagcaatacatcaataggccttctattaacaactctacaattaaacctaatctcaccaggtctcccagattgcaaatcacccaacttcaccatgccttctgcaaaagccctaaagaactcatcttgatcctcactaaacatcttcacatactctctcgtcactagattcgtgtacaaagtctgatcagagttaagaaaccctctccctgaaaccaagtctttgaaatactgattatcaaaaacctgaggtgttgcatctagatctccagtcacattctcatctccacccaaaggacaaagcttatcaagcttcttacggtaactcggttcaagagctggatccggtttaccagaaccggattggttataaagtctgaacatgattgaaaaacaccgaccttgacctattgagtgtgaccctgataaagcaaccatgtcttttacagaaagattgaatctttcgaagagatcaatcaagaaagttgcgttggctcttggacttggcattatatcgtcggaatcttgctgactcgctgttaaactgtctttcctccctagcttcacttcccaatctggtcctcctgtctggttttttcaaagaccaaaattacaaaaccgagatttcactaaaccggggaaattgaattttgacttacaagagcaacggcgtcacgagcggccatgataacgatatcggcacaagaaacagtagctggacaagctttctctagagcttctttaatgtcgtcaacgacttcgaaagatcttagtgaatcgatgttggaaagtgatagtttttcaccaagcatgtttggtgtgtcgtcaagcaacagagatgcgtcacatccctgaatttgatgattcaaagaaaaattcagagaggaaaacagagtaaagatcaagaacagagagaaagatttatagtgtttacattgacgaaacagtcgtgaaattggaaacgcatgacggaagcgacgcttcttgcttctttgatcattgctttcttcatttctcttcttactatggattcagcttcagggcatgtctcgctgtagaatcttggtcggagagtttctccagtaacaaccaccgtcaaaagtgttaggtagaggatgagatggggaagaagagacatacttttttcttttttggtgttgtgtttcagtgattgaagaagaagtagagactttgtttgttgggttataaagaggtttttggtggttttcgagaatgatactaaaggcttttgtgtttatagatggaatttgtgcaagtgtggtctctggtggtggtgggcattccaatttctataatttatttctttaataaatagaaataaataaataaataaataaagaaataaattttctaattatagaattggtgccaatgggggattagtgtagtaatttggtaaaattatgggtttgtgaaattattgaatgatgaatctgaagtaatgttaaatgtttgttaagtttggattattgcagtgtatattagctggcaaaaataaagaagataaaaggataattgatcaaattttttttataaaggtgtgaaacttttgtacgtaattgttaaaattggtaaaacatccattatacagtatttagatgaacagtactactctctttgtttattattgtattttgtaggaaatttttttgattcgaaaagatagtcatttttaaaatttctatgcaatatttattactagttattattgatgtgtaaacttcaagaagaataatatatttctaatcaacttttaatatgttttttaagatgtgtgaaaatcctaaaaatacattaataagaaacatcttatgaaaaataattactattaaaaacatcttaagaaaaatctaaatatatattcataacatacaaaaataattactactccatattaataagatacattaatactaatagtgattatttttgtataatatgaatagttagatttttgttattgtattcaacaactagttaaatatttatacaagaattttgtttatgtaacgtatacaagaaataatgctataattaatactattgataacaataatgaaaaaattgtactatttatgaaatgcgaatgatctagctagaaccaaacattaatcctggtcaatgttcataatcaaatagtgtaactaacacacatttattgataggcttttaaaggtcacgatgaatttgtgagtgaattattcaactcttgattttaaacctaacgtatggtcaaggcactttttgactttgtaaaaagcatacaaaaccttatcttcacattcacgttggttggccaaataattcatactatatttttttttacaaaaaagcatgcatcttttattcatttattgtttaatactttaatgtgatcagtgtcgtcgtagtgctcaatgctatagttactctacggctaataatttaaggataaaattaataaattaagataaaaagattagcaatataattctaaattatgcataatttacttaaaatttagatgtcaatttttgttttgattttttgtattttgttatataacaacactttagtggataaaatattatagtgagttggtgtcttgagataagagaattgttgtgagaaagggaggcaacaatttcaggccattggttcatattttttagcaatcaaacaagaaattatctgaaactcgaaaagtgactgacactacggaagtcgtcatcatcatgaccttgcgttctgaaactctaaaaggtactgatacgttgccgtttttaagagattatgttgtccccatctttagttgtcaatttttggttgaaccaaaaaaagaggttgtcaattttcgtatgcaaatttattacacttcggagaaacggtcacaattaattaatacataggactcggaaggtatctagtttcctaagaaatttatagaattcgaaatcaggaaatgggacgcacatggaggtcattgtatttgaggttcaccaaaccaatccttaccaaaagaagagaggatatcaataaatattgacccacattttaattcattaaatatgggttttttaatattccttccgtttaataaagagtatcattttgacatattcacacaattttttttaattatgtatatatttgtttctgtttaacaaataataaataatttattagttttaggttaatgttaaatcaaaaaaactcagtgtataaatcatgttgaaaaatgtaaaatgacactcttaatgttactatgtttttattaaactggccaattaatacacaggagatgtcatttgagtttttttttgccctcaaacccatttctatactagtttagaccaaagatgccttaatacaaaactcagcagtttcattcagtcccattagttattagtaatctcatattccgaaaatagtacactcaacgagctcctcatatgccttccaagacaatgtaagcgatcataaattttctcagattccggtctcgatttatccctaacgatgaactcacagacaattccattaacctcaatggaactacaaccaggaatcttctctacacctctctcgttcatcatcctcctcgctctctttgcatcttcccacatattagcctctccatacatgccatccaacaacacatagatcccgctatcactgggatcaagttcgagaagtttcttagccgctttctctcccagctcaacattaccgtgcatcctgcaaccgaataataatgctccccaaaccgcagcatctgcctccattggcatactttccatgagcctgtctgcttcttctaatagcccggctctccctagcagatctaccattatagagtaatgtttcaattgagggtttaggttgaatctagacttcatctgagagaaataatcacggcctgtttggatcattccaccatggcaacatgctgataatagtcctatgaaagtgatctcgtctggggcaatccctgcatcaatcatttcgttgaagtatgatatagcagtggatgcatctccatgaagggctaaacctccgattatcgctgtgtatgtaagcgagtttcttgtttgaattccgtgaaaaacactgagagcttctgagatgttaccacatttggcgtacatgtcaaccaatgaagttcctagcgcaacattgagactaagactgtatttctcgatgtaacgatgaatccaaatgccaacatcaagagcaccaagctgagaacaagcagataggcaatgtatcatggtgatttcgtcaggcttagtgttacttgtttgcatctcctggaacaatgccaaagcgtcttgaccacgcttggcttggactgatccaccgatcattgcattccacagtacaacatctttttcttccatatcatcaaaaagcttccttgaaacatcaagcaaaccacatctagcatatcctgaaatcattgtagtccacgacacaattgttctcttttccaagttatcaaatatccttcgtgcctcgtgaatatctccgcatttcgagaacatatccatcaaagcatttacaagaggaatcgtcattctcagtccattttcttttacgtattcataaaactctttcccacgattcaaatctcccaacattgaacacgaagaaaccaacccaatcatcgtcacatcatccggcttaactccttcagattccattagcttatatacatatatcgccttctccgcctcaccaatcttcttatacccattaatcaaacaattccaagaaaccaaatccctcacaggactttcatcgaacaccttcctcgcattttccatatcaccacaagaagcaaacatatgaatcgacgcattatgcacatgactaaccaattccaatcttagcttaagaacatgcccaagaatcatatgacctaaactactcaacctaagatcagcacaaaccttaaacaaaacagggtaagtgaaatgatccggtctggactcacaacaaccatgtctaagcatctgcttatagagcaaaaacgattctttaggattctcactctcagagaatcctctaatcgttacattccaagagaatatgttagggttctcaatacctttaagaatcttcacagagtaatcgagatatcgagattccgataatgcacagaaagcaattaaccggcttgaagcaaatgggtccagaatcaaaccatttattatcatctgagcttgaatttgcttcaaatgtaacaaaagtttgcatttttcgagcaatgaaagtagaggattgtgtagaacgaaactgtgagtagagttccagtttatgggtttgtctctgtgatgaggaagtgatcgagtacgacgctgagaatgagaatacagagaacgattcagttttggtgtaagaggaggaggaagaagaagaagcttggccttcgatatgttcatcggccgttgcgcgtcatcggcgaatttgccgggagaagaaccttaattatcagtctaatgggctttatacggcccaaaaaccaaaaccctaaagcccaattaaaaagccatgaacaaatttgagaagtaaaacggagaagaaacagctctcacttcttcagttcttgtagattttttcccagagattttttcgaatccggcggcggatattgaactttttggtttcttcgacggaagctacgaaaaatgggaagaggaggaagacatagaggtcgtactcagagaaaagatttcaaagaaagcagagagaatgtttggaaacgacccaaatccgatgcttccgttgatggttccgacaacgccgtaccggaacaaaaacccacttgggaacctattgtcactgttaaccctaacttcgaggaatattacaaggtaacatgggcttctgtattggtttgagacagttcatttatgatgtctttacgtattttcattgtctactctcagtaacttgttattgggggtttagggtttttgatttagataatggatatcatttagttattattgtgattctaatacttgtgtttgtgttgtagaaacaagggatagtgaaagctgaagagtgggatttgttcatggagattcttcgtaagcctttacctgctgcgtttagggttaactccaagtaatgttctttttcttttctcttcactttggtatttgttggtagtttcaatgaggtttagggtttatggttgagttaaagtttatatcttaggattggctcaatattgtaattgctaaccagatgcttctttccccctcttctatgaattgcagtggccaattttgcgatgagattatatcgatcttggagaatgactttatgaaatcacttcaggctgaggtaaattctgtattttatagtctctgtttcttttgtaatttaaaagctatatatgtatctctcattggttttgttttccaggccatagaaggtggtgaattggaggctattaagcccttgccttggtatccaaagaatctcgcttggcattctaatttttctcgaaaggagataagaaaaaatcagacacttgagaggtacgttttcactgacatatgaatgcttctagtcactttatattattagaatgacctattcaggttacttaggcaattatagagactctgtgaacggttaaggaactagtgtgtttgttgtgctatacacatgatgggttcttctttgtggtctattcaggtttcatgagtttctgaagttagaaaatgaagttggaaatattactaggcaggaagctgttagcatggtaagataccttcaaactcgcttccgcctttagtacttctttgttgttacaagtgaacttataaaccgttgttaaatttaatcatgcaggtacctcctctcttcctagacgtacatccagatcatttcgtacttgacagtgagtgaattttttatttgatattgttttgagacctagaaaatttctaaagggctcgaagaagtacccgctttgcaaaaggaagtaacgaccatgactatatccgctttttgggaaagtaagaggtcaatggagactaatctattatctttgtagtgtgtgctgcaccgggttccaaaacatttcagctgcttgagattatacatgaagcatcagaaccaggatctcttcctaatggattggtttgtgtttctattttatatctactattttctaaatctgattttaggtagatagataatttgattgttcttccctaaataaccaggtggtggctaatgatgttgattttaaaagatctaaccttctcattcaccaaacaaagagaatgtgcacatccaacttgatagtgacaaatcatgaagggcaacagtttcctggttgccgtttgaacaaatcccgagcttctgagaaaggaataagtgaaaatatgcctattaatcaacttgcctttgaccgtgttctatgcgatgttccgtgcagtggtgatggtacactgcgcaaggctccagatatctggcgcaaatggtattttcacctttggcatgttttacctattggcaatgttgtgaatgcattatattgtttttcattggttcttgaatttcttattccttttggtttatgtacaggaactctggtatgggcaatggacttcatagccttcagattattcttgctatgagaggtactttttttctttcttatatgtctcaactaatttccatgaaattgcttgtagaatgatccgcctatcgtaaatatgtctgtttggtcttgtccaggtttatctctgttgaaagttggtgggaagatgatatactcaacctgctcaatgaacccagtggaggatgaagctgttgttgctgaggtaattttcaaataacttcttcacctttcactagaaacccgttatagctttaaccgtgtaataactcttgcttaaattcagattctaaggaggtgtggagactctgttgaacttttagatgtttccgataagcttcctgaacttatacgaagaccaggacttaaggcatggaaggtcggtttctaccttcattaacgagtgaacaaaccctcagctctagaatctaatgggattactcatcttttttttccttgtctttgttaaatctaggtgcgtgataaaggtgggtggtttacttcttacaaagatgttccacaaaaccggagaggtggagttcttgtgagcatgtttccttctgggaaatacctcaaggactcaactgaaaccacggaaaagaacgagaatggtgatgttaatggctgtgaggatggactcaaagaaacagatatttctgtggtggatgctactcctgaagaacaagctgaggaagtctctgatcttccacttgaacgttgcatgaggataatacctcatgatcagaacaccggagccttcttcattgcggtccttcaaaaaaaatctcccttaccaggtgaactttctttttttcttggtgaacttcagattcttacattaacagctatggttctgtagaacttataaatagtttactcacagaatttcaggagaaaccaaatacgaaaaggaactcaactgctaagtctactgactcgacagaaaagtctccgagtaaagaatctgttgttacagtggatgctggtgtaccagatgagagtgcagtggagaaagttattgaagcagattcaaacattgagaaaaatgatagcttggagcctgagaagaaaatcacagaaggagaaagcatcacggaagataaagaggccaattcgagtaatgcgggaggcaagagaaaagtaccgatgcaagggaagtggaaaggctttgacccagttgttttcgtgaaagatgaaacagtaatcaatggcatcaaggaattctacggtatcaaagatgaatcatttccattacatggtcatctcgtggcaagaaacaccgacacaagcagcgttaagaggatttactatgtttcaaaatcagttaaggaagttcttcagttgaattttgcagtcgggcagcagcttaagatcgcttctgttggcctcaaaatgtttgtaagtaaaaaattcttttccccacttatcatttcggttgattaagcacaagctccagaagtgaaacttaagaatatttgcaactaattgaaacgcaggagagacaatcggcaaaagaaggttcaagcacgctgtgcccattccgtatatcatccgagggactacctgtgattcttccatacattaccaaacaagtactttatactccaatggcagacttcaaacttctcctgcaagacaaatcaatcaagtttcacgattttgtcaatccacagttggcccagaaagcaactgaccttgttatgggaagctgcgtggtgattctcagcgatggtgcgtattgattggtcttcatagatatacatttgaatttgatcatgcaggatgtgatttatatggttttactggtgcttcaggtgaagtaccggtgaaagcggatgcatcaacaattgccatcagttgctggagagggaaggctagtttggctgttatggccactgtcgcagattgccaggagctgctagagagatttgccgagaaaacaccaaaaacagaaggtggttcggtaaatggaagcaacggcgattcggacggtccactagctatggagacttaagccctcccttcttcataacttcaaattgtactcctttgttgtggtttgactattcccttactacctccaaattatttttcatataagcataatcatgatgacttttgttggaacgacataaaaaaaatgaaagattttgttctaaaaatcaacgtacactacacaaaactcactatctaaaaaccaaatcaaaacaatatttttgaagtatatgaaatggtttattttattctaaactgtaatggaccaaatcgagaagactgacttattgagctgcaacacacggtggtcttagaagactgacttgtgagctgcaagacacggtggtcttagcgagattcttcttgttcaccttgttgaagatctcagtcaagagagtgttgaaagagttctcgacatttgtggagtttagtgctgaagtctcaaggaaaaaaagcccttccttctctgcaaattccttggcatcttccacaggaaccgatctctggttctctaaatccgtcttgttaccaatcaagatgatgacaatgttcttatccgcgtgcactcgtagttcttccaaccactgaggaatgtgctcaaagctttcacgtattgtcatatcgtaaactaacattgcaccaacagcacctttgtagtaggcttatgtaatagctctgtgtctactcacagcaaaagaacaagaatgtcactaatcaaaccaaccacattgctatgtacaatggagaaaacatgccatgcacaatgattagccacttggatgtgaatgtgatcatcactacataatttgattcttcaggagaatgctataacaacacattacaatgttgccgaagaacaaaatcgaacaattccaacactaatggtccaacttctaaaagagtcgattactctctagtcaaaatgaggtcactctcaggtacacacgaagatcaaaatcgaaattgaacagcaacactgtaacatcatcgagttcgaagcaatattttatccattgttaaatcagagaagatagaactaagatcggagaaggatatagtaccgtttctggcctgcgatgtcccagatctgagctttgatgttcttatcgtcaataacgagcgttcgagtattgaaatcgacaccgaattgtggctttggaatccatactgaattcgtctcttgtgaaccgagctcgtagctgtgacttcccaaccgctgaatctccgttcaaaacaaccttgaatacgtagtcaacctcttcttcagccatcttcttcttcgctcgcagtcggcgatcgaacgacgtcgattttctcgctgtttttacactctccggtggactgagagattaaactaatcgtagggttaaaatgtaatcctctacggtagagagtactagagtgtatggtagtcaaagtcgtcatacgtggatttgattaatgattgctacacgtgtatcgcattgataggttctcttgctcggatcactaatacataaacttggatacaacccaaagcttgacctatttttgttgaacacctttttgtttttatatttttcatcctctgaaacaagtccatagactcttgtattaatatatcctgatgatatttggttttacatttgcatcttgtatcattgtaaacaattcataagccttcccacaaaagcatgcttggcatttgacaattggcaattcataaatgatgcattataagcataaatatcaacttggatattcaacttggcccgtgtattatgctacctctacaaatttggtgaggtaggttaaaatgaggccggtttgagttaccggtatattagacgagcattaacatgattacacacttgaggatattattgacgaatgaagaaactaaaatggtttagttaatgcaaaattgaggattcattcgtctattgaaatagagaagaattgtttgaggctaaaataaatatatttacatttttcctattctcctccaaacttttcgtaaacatggttatttgacttatttttgaactttttatctaataatttaaaggattgtggtgatgtagtggccacttaatctacacaacatcgcaataattttgacaaaattttctacatatttcttgtcaacaattataaggaattaacacattctacttagtagacatttacagtaatcacaaccaagatgaaataaccatatataaatatcatttgctatgttcataaactttatcgaaactagttgacttcttaaaatgccaactaattaggttagggttcatgaactttttagcaaagatagcacaaactaaattctatcttcaacctaactaatgacggtttactccggttaaccggtggttatgttctcatcatgcggccaactaagctaatgggctatttggtgatcactaatcaatgaccgagatgcactagagtttttattatgatcgagttcccaaaaaaggggcaacaagaaaaaacgaaatggcctatacagggatcgaacctgtgaccttcgcgttattagcacgacgctctaaccaactgagctaataggccatcttgctttatctacagctaactactatataacaactacacaagtgattctagtaactagctaaaattctccggtgttaaaaaatctcagattcgctcccgaggacgatttaggaagctttcgttagtttttccaatttcggatttggtcttgttgagaatatatttacgattttaattgagagattttgtgatagctcaatgtcaatggagtgtgtggttcaaggaatcatcgagacacaggttcgtttgtattttttgattgacgaacaaatcccaagtttttcgagttcatggatcagcttttagctttcttatgatgtccaattgataaaccctaggcttgaatttttattagaatttgattagattttctactggattttgcagcatgttgaagctcttgagattcttcttcaaggtctttgtggtgttcaacgcgaacgtttaagagttcatgagttatgcttaagaagcggcccaaatcttggtaaagccaattccttttgttaaattcagaaacttgaagcttcctatgaatcatacatgattcacatttgtgaaatcttcactttttcaggagttgtgtcatcagaagttaggctattatgtgatcttgatcaacccgaacccacatggtacagcttcttcttgttgttgttgttgttgtatatgttcttgtttcattcaaaggaagctaatttaagaaccataggacggttaaacatgttggtggtgcgatgagaggtgcaggagctgatcaaatctctgttttggttagaaatatgattgaaagtaaagtaagcaagaatgctttgcgtatgttctatgcactcggttacaaactagaccatgagcttctcaaagtcggattcgcctttcatttccaacggactgcgcacataagtgtttctgtatcttctgttaataagatgcctaaagttcatgctatagatgaggctgttcctgtaacacctggtatgcagattgttgatgtaactgctcctgcaacttctgagaattacagtgaagtcgctgctgctgtttcatctttctgtgaatttcttgctccgtaagttcatctgatatattttacagcacctgtgatagtgtctttgatataagcttcatcagtgatatgattccttgtgttttcaggcttgttcacttgtcgaaaccgtctatctccacgggggttgtgccaaccgctgctgcggcggctgcatctcttatgtcggatggaggaggtactacattgtaagaagtttgaagttaaaaacaactgttcttgtgttctctcttgttagatcttttggtccaatctagtcaattttccagattacacaatggttgtgaaatcttgtgaaccattagagttaagtattatttaatgagaatcagtaagggatctttaataaatattctttataaatcacaacttgcatatgatctttgctcttctctcaaccttttggtattatgatgtttcattgttgtcacttgtcagtagattgatagtttatgaagcttcgaacatgattaaaataatgtgaatgtctttgtggaattacatactattttatttatcattcaatcactaataaattccaatttgaaagcctattaaaacctaacatattaaaaatttgaaccacaaaaaaatgaattctaaaattcttccatttccacaacaataatcatcttcctccacttgcttcttcttttttcaagagccattctaaatatcacaagccagagtagaaaaatgtatatgtatagagagattcataatttcaatgtcaaaattttcgtgtttctaatcatctactggtgctattagcagtcttgttcttgctcatatcagcaagctcttcaataagttttttctcctctttgctcaatctcttaggtatctccacttgtactctcaccaactgatctcctctcatattactcttgttcaataccggaactccttttttcgccatcacaagcgtcgtgctaggttgtgtcccagctggaactttcaaatctactgtcccatccactgttggtactttcagtgtcgtccctaaaatcgcatcgatatacgatatcttgcaagtgtagagaatatttgtatcgtctcgtttcaaaatcgggtctgggataacttctataacaacaaacagatcgcctggtgatccgcctctcttcccggcattgccttctcctctcactctcaaccggctacctgaatcaaccccggctggtactttgagacttatccgttttgtcttcctcacgcgtccgtctccagagcaagtaccacacggcgtcgagatctctccagtgccattacaggacgagcaagtcatgacttgttggaacacgcccagaggagttctagctgctgaaaccacttggccttgtccgccacacgtggtgcatttggtcggtttggttccaggttttgcacctgaaccttcacatgtcccacagctctcgagccgggatatctctatttctttctccattccgaaaaccgcttctttgaagtttaagattagcgtgtaatactcgtcttgaccatccacagctctgcttcttgaacctctacccatcccaccaccgaagccttcgaataatgagtcgaatagatcgaacggattactaaaatcctaatgaaatttaataacaaaaaaccaaaccaagaagtgatcagagagttaacttcgagtgtctataaagaataaatctgtgcatctgtgttttgaacaacgtaccccattgccaaatccagcagcgcctttaagtccggcctcaccatacctatcgtaaagagatttcttttcatcatctgataaaacctgcaattttgttctttagtcactaaaagtacgaacttgcatagtagaaacaaaggagaaactgggtttcatttcacctcatatgcgttacttatttctttgaatttctcttctgcgccaggatccctgtaagcacataataaacatgtaaacaagacggtaacacttttctaacttagaagtgtcagtcttgaaaggaaaaaagcggtttctgagcatttcatatttcccggtctgtattttgctaagggctatgagttcttaaaataactggtttccctaatttggggaacaacataatccaaggtttgcagtcatcttgtttttggcatatctaacatttggctaacagatattaagcttcttatctctacttgactgtcgatcctatcttcttattctcaagatatacatccactatcgtcatcaagtgaagtttttcacttacttgttcacatccggatggtaattcctagccagcttccgataagctgaaacaagagcaaggaagagcgaatcaatgtcataccaaaaagtaccaagtcaagaaaaaaaaagaaacgccaagcaaagaattcacatcacgggtttgatcatgcattttaacatatgcaaaccatctatatatacaagggaatctctcacacacagaaaaacagaaacataccgcttttaatctcagctttggttgcatttttcgaaactccgagtaccgaatagtaatcctagaattgcacacaatcacacaaaaagcaatcaagatcataataaatagtgaagctgagatatacgcattcagcaaagggaagaaaataggaacacgtactgcatcagctctaacagtgaagcgagatcctctgcgaggaggatgcatatttctggacattcccgtcatggacaagaagggcaatgacccatgtgagaacatactcgactttgaagctcccaaacaatttacttggctactggaactgtaaaagttgtgaaaaggaaaacctttaatgctatttcatatataaaactctcagtgtagaaatcacataatacaaacttcattctacgaagactaatcttaagatgtgcaatgtgaacaaatcaaaatacttgaaaggcttaaagccacagaactgaatgcaatccagagacttaaaaatcatacttttgatggcgagttgattcgattctgctgggataataagctctgactgcaaattgaggacgaatactccattgagcaacacatgtacttccaagttgtattatagccatatttagctcaatacactccctgcaacacaatataagtagctctaagcctcaaagtctggctttttaactttaaaaatgcagaaagcaatcatgagtcaaaaccctaaacccccaatccttacacaaagattcaaacttaagaaatacacaacatcaatttcaattgaacacacatacttcaatcaaagtacaataagaatatcaattttacagaaaccaaaaaggcaaaacatttctatcaaaatccgagctgggcgggaaattttctgggcggattccaaaagccgtaatttctccctctccgggaacgaaacaatcaggacaagcataagaaactgtgtaaaaccttgaattgatttgatggtttcaatcgtagaaaaaaactaacagaggcagagaagacagagatttatttatctatagttatgaaattgagtaggagaaggtgaatcttaccgtaatcaatggtggacgacggaagagctccgagagagataagaaaagcgatgagagtagagagaaaacgtatgaaaggagttcgctagaagagcctacctcttgtttcttatttttaaattttttcttttttcctataaattttattaatgaaataaaatcaagcaaaataaataataggtggccgggataaaaaaataaagggtctgagtggtaaaagagctgttagctgttaatcggagagctaaagcttgtttaacaagtcaggaaaccctagtgaaagggaaaaataaaataaaattagtcgaccaaagagccctaaaaatgataaagaggcggcttagaccacgacgaataagagtcgtcactcaagcatcactatggtccagtccctgtgaaatcgataaaggtgcttcacattggtactaattaacaatgaccacaacaccaataaccaaagcctcaagtgctccaacactagacgcatcaccataccttttacatccagatgatcaaaatcacaccaaatcaagtatctttagctacatgcctacatatactctgtatctaaaaagaagaaaaatttgcaaatatctgcattgttttttttttggtagaatgagggagactgcgtctcccgttttattaaaagaaaataaaaaaattacacttggacatgtctcgggtacgaaacccccgctacatcatctaacaaaatagaactaacaacatcgggtctagactccaacaaatgcaaacctagggataacgagaaagcatagttcgctaatccatcagcaagacgattagcttccctatacacatgagagattcggactatccagcccttcgataaaaagtcatagcacaagcgtaataggaatgacaagggatgagaatccgcaatccctgtcgtgagaaacccaaccaccatcttcgagtctacttctaattcaacccgccgagctcccctcccccaagcgatgaataacccatagtagacaccccacaactcagccaagggtgcggaacaaacacctatattaaccgcaaaacctccaatccacgctccattatgatcccgtaaaaccccacccgccgttgcaaaccccggattaccccgcgaagccccatccgtgttcaactttacccaaccatcttccggcgatacccaagacaccaaccgctcaactctactcacccgcacctcattccccttcacaaaagcattcgctatcgccacttcctccgccaaatccttaataaacttaacacggtccctacacttaccattcccgccaaagatgttgccacacctccatttccatccccaccatactgccattacaaacaccgtcggccatgatccacgttcccgtaagttcttgtagatccactccagcaaagaagcagtgaagaattgtcgtatttgatcacgagggactaaccggctccatatccctgccattgcgggacagtcgcggagaacatgtagaatcgtctcctccccgccttgacaaatctgacacaccctcgtatcactcaagtgtcttcgatatctttccacattagttatgatcacttgctgcaccactaaccagagaaaaacacggactcgttccggtgccattactcgccaaatcctctgataaaacagtcccatgaattgtttggttcaatataaattttactcttttttataccttcttatctctaggatatcgataatgctaagcttttgtgaaattattaagacttctgaagcttatcaaagataagattagctttatttcatcgaagaacatacaagatatcaaatcaccatcaccgttttactataaagattattggtttctatcatttcttacaacaacatttaaaatttggtgctaaaccaatacatcctccatccgagtaccccttgtctatacacactggcttgcatacatcatctaaaaaatgttctgaacattctgcaatgcaataatcatatctaaatccattgtttcctgcaaataatatagttaacttttgagtcaaaaatgaaaaatcctacacttagcaacgcttctatcggtttctgtattacatggcatatatacaaccaattttatatatatatatatatatatatatatatatattgtagctttagaaaacatggatcaattaggaaaaactcccttttactgattatcattgctaaaagtagaacttttcattgccttaacaagaatagacaatttcattttattgaaaatacattattttccttaatcacataaacaagtttcaatccaattaaaagcattgaccgtacattttttctcgagaacttttacacagctctagaattgtgattttcttagctgaacaacaccatctctgtcaattaatcgatcctataattttattttattttgctcgaaactccggccaaacgtttcatgaatctccgatttcgaagcttaaatgaaaattgcagtgtgaagcccaaactggccatcctatgaaagtgatttccccttttaatctccggtggtacaaaccgaccatcacttttttgaagcttcaatgaaaagttatttcccctttgcttttgaattttgataaattgaagaataatttatataattcttgtctaaagactagagcttttgggttccctagatattatctttaaggtttagatttctttaatcaaagctcgtttaattggattcattggatttttggcgttgctaaagcaagtgccaatggtggaaacgacggttgttggtcggacgctacggagaagacgatgaagagattggtttgtcaacaacaaaattgagggcaaactcgttatttcaaacgtcaaaaagttcccagccttgtaagcacacccaaaatgtgctttctcattattttttggacttaaatatgcctaattgaacaaaagcccaaaaaaaactggtaatatatttttactgtagaagaaaaattaggttgtagataggtcctacagcccaaccaattatcctctttaataatataaagactacaatttttttttcagtcaactataaaattgttgtattttgttttattctatagatagttttgtaaaatctggattgtttgaaaattaacaatttttttgatttgtatgatcttatgtttatttttttgggggaaaatatgatcttatgtttattcaatagaggattgctgaaaaagtattttgtattgataatttattttaattttatgtggaaaactttaataatgtttttaatagatatttaattttaggaaagtaatttttgtagtttaaatgcattaaattttagtttatatattaaacaattgttcacagttagtggtaagaactaaatttgaattttggaataactatttttttggcaaaattaggattcttcagattgtttagcaattggtgttagtatgataaaaatagttattctataaaatatatctaatatatatagtagaattaaattaataaaaatattaaactaagatatttgttgatttcacacgtgggcacaagtgtttcgcctctaatatgatcaatgatgatttgttttattacaatacaatacaggaaaaccttcttttctccaccattttcggccggcgtcggcctctccggcgtcggcctctccggcgtcggccattgtcgtttctccatttagttgttttatttcctctaattattgtacaattttatactttcagtaattaataatggcaaatctagattgtcaaacctacgtaacttgcctctacgcgacggtgggatttcaggaactgaccctgtcaattccaaatcagactttggtcacgcttttggggccattcgtggtttggttcatttctcattttttttggatttcagtgattaatatgatagagtcatcccacatccgttgccgctcccatcttataatgttgatccgatggaaccaagttgtctttcttcatagaaagtttgtttccggtgtgcttgttcattgccggtggaatttccggctattaaccggtgaatgtactcttacccaatggtatggagtttctacatgggtttttgatcccggaatcaatggaggaatcaatctacttgatggaatcagaattctagatcgaattgaatttcttatgacgctaacattgtctaaagatggtgatgtttactcattaccatggttggaatatttgctctcgtctattgattctatgggatgtggagtatatggttctaaaatgaaggtggcaattttctttgaggatgatgatgttcattacttttcatggacggaagcctctcttttaccggaaggagattgttttattcaattgaattgtctttggtataaacccaaagaagacacgagcgtgatgggacggaagatggcctcaagtgactgtgatagtgatgttctctctttctctttgttggaaaatttaactgcaatgaaaggagaaatcaagatcacaaataggcaacgatgcgttaggtgtttccagcatatcatattgagtttcaaaagacaagaagcagaatcatatcaagcaacaattcaggtttttcttttaactaaagtaatgcgaaaagcattttggagtttcatctatatggtgatagccaattatgagtatgtaaaggagggacgtaacagattttatctgttagcctgtaaggcttccgatcggcaagcatggtcaattccacttctttatcgaaattgttatcaatttcttttatttgtgtcaatggttgtatatgagtggtttatatatcttgtaaaactttttatgatataatagatttgattgctgaaaaaaaaaaaaaaaaagtcgaataatataattatttctttattttcgtaatatttattgccaaacattatttattttctatagtcgacttattaatttagagatttggaaaatctacatagataatttcaattatactccaatatacaacaaacaacatacaataatatacaataatacgtaatttacacacgctaaatgtataagatccaaattatatatgcctctcgaatagattatatatatagataatgtttattaaaatattttttttttaattttttagtaaaaataacgttccacgatataccatggatcaatctttaactctaattaaaattggaataggtttcgttcacaatcaataacttgtataattccattacttccaacgtgtgttgccatacattttacgatgaccattgggtaaagatcatctggctgtccgacaatctcaattctccaaccataaccaaaggcttcgaaagaattatatcaagactcgattccataagctcgacatgtgtttgttagtgcagggttaaacactctccaacatctctgacctaaacagagaaggattcaaataaaaaaaactaaacagttcggaaagaccggagaatcccgacgaagcatgttaatgggctggtgagcaaaaccccaataacaggtcgcctttggcctgtttcccgtttgggaggtcgcttaaccgacttctaaactcgtaagaaagtaaaactacctattctgagaagcgaacaaaaatcaaagattcaaactcgaagagtaaggaagttgagtttatcgctgaaccgtcttttagtagtataattaaatagagggaatttgtcctctattcaaaggatatgcaacttaatacaaaaaaaacttaatattatttattgttctttagcaaaccctaacttgttttcaaagcaatctctaatctcgttgaatcaagttttagaccaaatcaacagcaagagaattgattagatttcttttcccttttttaaacaaatatattgtgtgaattcttggttcaacagtgtctcacaatctgctagtttaatttccacttaaagcattgcaaaagcctcacaaatatcatggtggttatcaccatgcctaaggccagagaagcacatcctctctttccagtaccaaacaagatcaatattcttcaccatctccttcgttcatatgaatttgtttttttaagtttctttatttaaaacactcttatacgtatacaatatataataattaagtttgcattaattagagttggtaattaatggtcatgttcatgtaaacgttttagctgttaaaccttatttaacagcatctttttaattctttaatttcttcttctttacaatgtagcatcgataaaatcaacaaaacacggactatgtagctaacaagatttctgtacctaaaatttcctaactaactgtacattcgttcgattgtagggacatttttgtccgaaaaggctattctgtaagaactgaatctaattttgctaaaaccaggttaagaaaacatggtaaagtggcttatggcctgaaagtcgtcattttctattcgagttcaatcatatagggccgtggtaatatgtagtattttgtcgcgacccaatcattgacgagaaaaaaaaaaagacaattgtcaagagatactcgatgtgaataccttcttattaatcatcaaaacaaaaccaaaattaatacatacatatagaaaaaagcaagagaaaacacagatcaagtgtttccaaaaggaccaaaaccgaacaaagtttggtttgtgattcactaaactttgggttatccatagtatatacggaattatcctcgccgtacgtcaccgtcgcctcacttcaccattgggtaaaggtcctccgacaatctcaattctccgaccaacaccaaaggcttcgaaagaaacatatcatgactcgattccataagctcgacacgtgtctcacttcctgctagtttccacttaaacccttgcaaaagcctcgctagcatcatggtcgttatcgccgtacctaacgccggagcagcacatcctctctttccggtactaaacgagataaaacggagatcattctccgtcaaagtcacttccgaacactcattgagatgcctttctggtttgaagctaagtggatcagaccaaaccttggggttacgaccaagaccgtaacggctaagtaaaacttgacttcctttaggaatatggtaacctgcgacggtcgtatcagagagtgccacgtgtgggaggttgaaggcggcgacgggatgaagacggaaagcttctcggataatagctttaacatagttaagttttggtatatcggattcttggacgaatctttcttttccgacgactctatcgatctcttccatagctttgtggaggatctccggtttgtttatcatctccgcaatggcccattccacggcgtttgatgggttgtctggcgccgccattacaagttcctataaaattaatatgtaaaatattttcattagtttaagcaagttgacaattaataaatgattcttatcttataaccaaaaagataaagattcttatcggtttactgttctatgcatggactcgtggtcaacatgctttatgctacacataagattttgttggatatagattgtttggtgtttaaccttttctcccaaaattgctaagacaattgtttttgttcttttaatttgtggacagcaaaatagagtcacaatcagtttttttttttcttttattttatagatgttgtgtctccactatttccttcctaataagtttctgccattttaactccaaaaaagccaaaccctttttccatgagtggactcatgactcacgagtcaacatggatatttgacgttatgtttcgctttcaccatatttaactttcttatattaaacaaaaaatacgtctgaatctgacggatattggtggattgccttgttttttttagcaaagatactttgtaatagatgttatggcattttctctgccaaaagtgaaatattactctttcaacgcatatttttctaaagaatattagaaatctccactatttcaactcaaagaatgtcaaactatttactcgtcgatactatatataaatactatgtcatatattattatatatcgaacgtaacagttggtttaattttttaaatatgtataaatgtaacatatgaaaagtatattaaaaagctatgtaccttaatggttggtttgatttcatcagcggtaagcaaaggctggccagcttcgtccttgatagagatgaaaatgtctagaaaatcttcgatctgagttctcttaccttctctccacatcttaatcctctcatcaattataggatcgtgatatttatccataattgcactggattctctcataatcttttcatgtccgtttagatccaatcccgtaagcatcggtagataatccgatatacaaaacgcaaacgtaaaccctaacccctcgaacatagcatccatatgctcgatatcttccaaagtcggtccaccatcggcttcggttttctccgagaacgtcctcgtcccgaacataagcctcttgattgcatttccacaataatgcctcgtaacaaaacggagatcgactggttcagagttcttaaccatgttgtagagccaagcggtcaagtgatcggtttcctcagctctattgtcgtgtagccaacggtgtctcgctggacaaacaatctctgtcatgatcactttcctcatcttcttgaattgttcgccaaacggtgtgatcacgcaggttttgtagccgttagagagaatcttttgagcataagtgagtggtcttgacgcaaagagtgcgtcttgttgcttgaagatctcacgtgcaatcttaggacatgtcacagggatcacgtgagtgtttcctagacgcacacaagctatctccgtgttaagctccttcatgaggctgtggagccaccggaaaactggacggtttttaagcatcgccggaatcattccaacaattggaaaaccggtgggtcctggcgggagaggatgcaacttcttgtttcgtgaagatgactttattttgttgagaatcatcaagaagcaaagggccgcaagggcttgaagcgttgtgaggagatacatgttggtaaacgacgacattccgagacttgacttggtcgtgagatccgaagagtttgaagctaaagtatccatttgcaaggaagaaggagaaggagaaacaattagtatgtgttttgtaatatatgctaattgtttctgcatggatccttctttcacgttgttatttataatgtcacattaattacaggtaggtacgtgtgaaatgacgatagtaccccttttgtggtgggggaggaagcagtgtggaaggtatagctagagttggaccaacttggtctctagtgaggagtgtcaccatattttgaattttgtagggctaactttcaaaaaatgtacataaaagataataatcatgtataataattcattcataatatattttaaaattattttgttggtgacctgccaaaaatcctcgtgttatatatgtactctaaactaacaagacagtttttttttttctcggtaatatgaattggtagtctctttatcttagcactactctcatatctaacagagccataatagtagctttaactgattgaacttacattatatctcttttgagtatatcttattttggtaggtcgtttgatttatcttcataaatgattcgtctctacaatatgtcatattcaataatcaatacgaacatgatgttgctttttttgggggataataataaatgtcccttcagctttttgtagttatagccaagtctttcctatatatcgataatttatccgtggtgtgaactcttaaaatgaacaaatatatgaaaatattttatgtaaatctcatatcgttatacaatgtgtaaatttgaaattatatgatattaggggtgtcagatacttttaaaaatatgtcgattttgttttggtaaaatatgtgtcgaattcttatagtcgagtaagtgtttaaaaaatctgtttcgatatattaatttgaaaccataagtacataattgttttacttaatcatcaaaataaacagaattacattgatgttcaaaacaatagaatgagataagcaaaagtataagatgtttaatcatcaaaaatctttttgatatttagtctacttatttgaaaagggtgaaaatatatattaaacaaatttggttacaaatgaaaatattggtacacttcacctgccaaaatgcctcgtggaattgatgttttggtcgttggagaaggaaggagtttactactaaccatatgaatgtcaaatatagtggtgggccctacacatatcgattatccaaaaatcatgagcttcacgtgacggatataccagatatggaacgagtttcacatctccatccatagaattc

SEQ ID NO: 266 - DNA, 95375 bp, Arabidopsis thaliana
aagcttcatgaacaatttacacgaaagaaaagagaggcaaactcaacaatttactgaaatatttgatatcaagagtgttatgtttataaacgagatatagtctttcaagtctcaaaagaaattttagagactacctgagctcctcttcctttagccatatatagacctacatggtgcatcaactcctgatacaaagaaacacaacagaagaataagaagatgaaccgattccaagtgttaattgacaacaacaacaaaaactaaacatgctaatttcagaagcatcaaacttttcacctgaggatgagcctgagcgcctttgatgtctttcgcaacatgaagaggaaggtcaaaagtagcacagccacgggagtacactaccacatcttctacaggagaaagaacaccgtggtttcgggcagaaagtgcagtagccacaaaatcaaacacacatatgtctgtacagatacctacaacgacaatcttaagattcccaaaacatagggatgttcaagatttgtttaaaagcagtaaacttgttcaacatcaaaactgagcattttatcaaaagaaaaacttacaactttgatctgtttttccttaacccaatccacaaaaacattagaaccatcactctccatcgaacccacaaacccattaatacaatcctttcgtctaagagtggcacaatcctcactttcaagccatttcagagctgattcattattatcaaaagaagaagaagaaatcaagacactgtctctagtaatagaatcaaacaaagacactaagaaagctacaccaataccaggaacaagttctgattcttcagttcctataatacaatgaggaggataaggtctctccggaatatctggatgatgagagtcaataaacgccaaaaccggccatttccgatcacagaactctctagcaagctttgcactttcctccaccatcttcgatatctgttcattatgctttgttggagcctgccaagtcaaacagcttcacttaggcaatatcacaaacacttggaagacattaagaaacaaaaaaacaaacaaacaaagtcacaattcttttcacttcgtttacaaaacgtttgacttaagcaatatcacaaatacttggaaggcattaagaaacaaaaacaagcaaagtcacaattgtttttttcgagaaattgaaccaaaccatattgccggagccaattgtgcagaagccattaacaacgtcaacgatgacgagaccaacgcttgagtctcgattcaaaatcagaggttcttcctcatctactggaatctgcttctttagctgatcaaatatcgtttcatgattcgccatatcgatacgagtctagaaaaaattgagaaaactggatcaaaaatttgtaaagtaattaatatagagtaaacatgatcaaaaactggatcatgttttgcttagtcagataattttcagataatataaatttctgttttaagtatttcgatataataaataaaattagtattgttaccaattgggggtgtagctcatatggtagagcgctcgtttcgcatgcgagaggcacggggttcgattccccgcacctccattttgatctctctgtgactcttaccgtcttacgtatatactttttgcctgttcagatgaaagcagattatgggctaacaaagcgagcccattagttaaaaagacttcccaatcaggcaggcaatcacaagcgaagcccttcaatttttttaatattaaagaaaaacttttatgcatcaaaatttgaacttttattctattttattttgtgttcaatttcaattatattatatcagaaatgtgttacatgatacataaaccatttaaatataattattaccaaaataaaagaccataatttcgataaaaaaaaatggtagtaacacttcttcctaaatggaagttttagagacaacatatgaaatctgttaagtcttttttttatatacttggctaacattttatagatgaaattctcaaaggagttttgcaacactcttattatacaaacatacaaatagtttatttaaaatggttttggaacatgtcttttataataccctatcaatcattaccgatttgtaactatgctttctttttctatggaagatggataatccaatcaaggggcatcgataacatcaccatcatcagaccatgtctttaggaagaggaagttatcatggagatcaattcctcgaaaagatttgtctattgtcatatcaaatacccaaatgacttctctaaactataggttatgataaaattcaccgattgttaagaaagaccaccaaaaagatttttaaaaaaatattacattacaagtcaaacaaatcgatatatcacgagacgagagacatcgctaagatgaatttgtcagaactatcgtgttgagggaagaattggacaagtctcaattctggcccaaaaagagttgacagctcgatttcgacttataagtcaaagcccgttacaaacaaagcccaatccattgaaaatgaatgttctggagaaaggacagatcatcgcattaaacagagggaattggccggattaccctcgtcgtacgccctaaacaagcggctataaataaagaatggaaagaaacgttgatgggacgggaatttggcactaatacagcgacaatacaaccacaagcgaagaaacgattgttgacgccctaattcgacgagctgaagactcgaggaaggatcgccctgacctcaggatcgccgctcccactcttccccgttctgagatcgttgccctcaacgcgtctacctcacttagcttccggctcgaacaacttgaagattcttcttacttctccagagatcccattctttgtacttgtttgattcctgtatcaacatatcggtagaaacatgttgaattgataggccaaccaaatcaaaaatttaaagcaaaagcgaaatcaaaatcttatatggggtcgttgtaggaaaaccttgatcattttgtttgaataaaattttacgcctaccgaagaaaacaatgatacgtcttccaatgaaatgctaaactatcaatgactatgcacgatactactataataacgcaacctctttgtcctagcaaaatagatattcgaatttaaaaattcgtatgcatgaactttttgtggaaagaatcagatctcaaaagtagtctaactatatgtggtgattatggaaacagatcacttatagtaatctgatactattgggtgtccatatgtacggtaatactaccacacatcttaccgacctaaacttaatctcagctgttaatcgtacctacaacatctgttttcacaatcaaataaaataacactatacttgtaatgctgtaatgttttaatacctttattttatcgaacgtaacccactctgacccgttcgtatatatatctatatgcttgcctataaatgaagatagtcaagagtcgataactcgatatcatcaaagtgaaaatgacaaacttcaaagacaacgatggagatggaaccaaactccacgtggtaatgtttccatggttagcctttggtcacatggttccatacttggagctctctaaactcatagctcaaaagggtcacaaagtctctttcatttccactccacgtaacatcgaccgtctcctcccatggttaccggaaaatctctcctccgtcattaacttcgtcaagctatcacttcccgtcggcgacaacaaactcccggaagacggtgaagctaccacagacgtccctttcgaactcataccttacttaaaaatcgcttacgacgggttaaaagttccggtgacggagtttcttgaatcttcgaaacccgattgggttcttcaagatttcgcggggttttggcttcctccaatctctcgtcgtctcggaatcaaaaccggattctttagcgctttcaacggcgcgacgctcggtattcttaaaccgccggggttcgaagagtaccgtacttcgccggcggattttatgaagccgcctaagtgggttccgtttgaaacttcggtagctttcaagttatttgaatgcaggttcattttcaaaggatttatggcggaaaccaccgaagggaatgttcccgacatccaccgtgtcggcggcgtaattgacggctgtgacgtcatcttcgtacggagctgttacgagtatgaagcggagtggttaggacttacacaagaacttcaccggaaaccggttataccggtcggagttttgcctccaaaaccggacgaaaagtttgaagataccgacacgtggctgtctgttaaaaaatggttggactcacggaaaagtaagtccattgtctacgtagcttttggttcagaagctaaaccgagtcaaacggagctaaatgagatcgctctcggtttagagctttctggtttacctttcttttgggtgttaaagactcgtcgtggtccgtgggataccgaaccggtcgagcttccggaaggattcgaagagcgtacagcggatagagggatggtgtggagaggttgggttgagcaattgcgtacattgagccatgactcgatcggtttggttctgactcatcccggttggggaacgataattgaagctatccggtttgctaaaccgatggcaatgctggtttttgtgtatgaccaaggattgaatgcgagagtcattgaagagaagaaaattgggtatatgatccctcgagacgagacagaaggtttctttactaaagaaagtgttgcgaattcgctaagattggtaatggtggaagaagaaggaaaggtttatagagagaatgtgaaggagatgaaaggagtgtttggagatatggatagacaagatcgttatgtggattcattcttggaatatcttgttactaatcgttaactttgagtcttgatccaatggtcggttaattgagtgaagttgatcaagtgttgcaaggatgatcattgtataatgttatgatattttggaatggtcaagttttcttgagacaaagaaaattagcgtctcatgatattgtggtatcaaatactctatccacatgaaaaaatatagggtttattggcaaagtaacactttttcaaaaataatttgtaaagtagatagtttttttagaaattagagatataacatttttcttactttttgtgagatagagaatatgtctaatagactaaaaaacaaaatatatatcaaatactataataccctttatcttgagagagaataaaaataatatgagagaccatttatactttattttatttgtctttatttttttaatttttattttagttttcttaaaaaaatttcttaaaaaattacgttgacttttagagtatttatatgtcattaatttaatacacaaacatttcaaagatcgttttgtacactaaccattattcattggtgtatgtatataccgatattcataaatagaagtaatattgtttttaatattttacaaatataatgattgtataaaccaaatattattacttaatataatggtttacatgatggtgtacataattaagttaatcttgatggtgtacaaaatgattgaaactattatgacgattggatagaatggtgtatacaacttttgaatgatatcatacaagattggtaaacaaagtgtacaaaacttggtgtacacttacagggaatgtataaatcattatttcagttagtggtgtacgtcatctcgtacaccaattttagtacagtctcatagatctttaaagctgtacgatcatgtacaccatattttcaatcatctatgtacatcattttgtatactattatactcactctatcacttcttacgataatattatatgttgatttttacattattatcgtacactaatatttgtacaccagttttaataatatcacgtatactgtcggctgggattaaataaaaaaatgctacatatttttgaaatatagcaaaattagtctttttagattcacatacaaaatttaaaaattaatatgattatatggtaattttttatgaagaattattattaaacaaggtaaaaaaatttaagtaaaaaaaaaaaagagaaaaagtaaaatttgacttgaattttgtctttatcttactacataataaaataacaaaaggttatataagtcatttactaaaatctctattagacaaaaagttgtattagagtggaaagagaaaagtgtctatttctcctatttctaaaacaactacttactttgcaaattatttgtagaaaaagtgtctactttccaacttatctcaaaaatatattcatcctcgttaccaccatctctacattcacatttttttcttccgagaatccaactttatgtaccatgattttattttagaaagaaaaaagttgaagtattaagacatatatgtttactgcggtaaatttctaagattgagattgagactgcatcaattaaaaacgaatactgcggtaaatttctttaaacgaggaacaaaagtttatgaaaaagagagggaaaactctaactcaaattttggtaaaaggtaatttaaaactcaaattgaatttgaatgagttcaagttactagttactacatttaatgttgattatatttctattggaaaaacttaaaagttgattgtttatctcgcaatcatccttaaacaccacacttgcaaatgttacaaatgcacgtgtttggtactttacctttaatctgacaaaactttagcgtttgcgttttgaaacgctgcatcgcaatcgcccgagtgaacgtttaacaaaatcaaaattgaagattgtcaatttccttctaccattaacctttccttttataaaaaattaaaaacacactgatataaaatctcagcgaaaatcgtggtaatttcagagattcacgcgtcctaactaaaatcaaatcgtgtttttactctttttacctctttcctattacatcaaaaactaatcttttagcgtttaaaaaataaaataaaggttcttttagcgttttctcgttcccgcttacttcactgcgactacaacgaagagtcgttttcactaaaaattgtgccgccatgaacaaccgccgtggagtaacaaccgccgtatcgaagcgtcgtccagtgattcacgtgttaccagacgagacagcgatacgagtagtctgccacgcgtcagtaatcggtggtataatcggttcaaacggttacgttgtttcaaaactccggcgtgaaaccggtactaaaatccattgcgagtctccagttaacggctccgaccactgggttgtgttcatcgttggttcaaccgctgttaaccaaagtattctattgactgatagagtcggagaattctccggcggtgagcacgaagattgggtgacgtgtgaagtgtccgccgctcagacggcgttgattagggttttggaaagatcatgggttgttttagccgcgaaagatggcggcggagttgttgatggtgaagatgaagaagcttattgtgggattttggctgatcggaatcagattggtgctgttttgggtttgggtgggaaaaatgttgagtggatgcggagaaattccggtgccatgattagggttttgcctcctccgatttgcggcactaagaatgatgaactcattcaggtaaagttgaagtctttatatgatttttggttaaaaagttgttaaatttgttttggttatttggtttttgatatgttgtgaatgtcacttctttgtgtgttgtattagattactggtgatgttttggctgtgaagaaggcactagttatggtatcgagttatattcaaaataatgcacctctcaatgggtatccaccgccgcttagcatcaaaggttatgagtcattatcaactgatgggaactcagaggatccacattctgagtttttcccaaatttgcgttcttcttcgttgtcaaatgctacagaaattgttgcatccaatagacatttaccgtatgatggtggaaatagtacagaacgaaaagttgtgttcaagataatctttactagtgttgtagctggaggtattattgggaaacaaggaactattattagagctctgcagaatgaaacaggtgcttctatttctgttggagctccattgaaagtatctggtgaacgagttgttactgtttctgcacgtgaggtatataggtttctattcttctgctttctgctacacatttatccgagtttctttgttgaatgttgacataatcacattcgctttgttgttttcttctccttagaacctcgagtcacggtactctcatgcacaaaatgctctggctcttgtctttgcaagatctgttgagattgatgttgagaaaggtctgcgtccgggattgcacaatggtgccatagtgaaaactaagttgttggtaccatcacattttgctaatagcttcaatggaaacggaaacagagaagcaatcatagcaactggtgctgatgtacacatttcagtaggcaaccaggttttagagtggatctcagaaaatgaagtggtgattgaggtaagtgcatgttttcttgtaatcagtgtaagtgttttcttacccttagagatgagaacattgcaccttttgatcctctgattgttttaagattaagggagagtatagtcatgtacagaaggccttgactcatgtttcgtctaaattacgggaaaatctattgccaaagaaggtcctcggagaaatgagagctagagttagtaatccatatgaaagtgcaggaggaagaagccagatttataatctgcaaccatcacaacaagtaagtttgtttctttcctccaagctagaggtgatcgcagccatctaattcaataaaaccgcaggatgcaagcaggggtgattctctctcggtatcagctgctgtaccagacttgaagatggttagaagcggtgcagaagtattgaaatcaaattctgtaatgcacaccgaggtccttaaagaggtggatgaactcaacgactttacacttccacaaagtttgctggaggaagacttgacacaaggaatgaaacaacttcaaatgtctagcaatggagacgtctcttctttaccaccacggtctgttcttgccaaacagcaacggttccattttgttaacaatcattctcgttgaataaaacaaagtttctctttgttttgaagcagaagtaaaggtgtatctgtgagaaaaattaccttggagttagcagttgagaaagatgctcttggttcactctatggcagagatggcaccggtgtggataatctacaacaggtatataaatgataccctctcttaatatatatcttcagatgatgctagacaatgatgttgatgagtttttgcaaactttcagatttcaggagccaatgtggatgtgaaggatcctacaggaactgaagctacagtcttaatctctgggaatcctgagcaagcccgcacagcgatgtctttgatcgagtcaatccttactgatcaataaatgattgcgttttgcaactacttttggttgtttcgttttgagtttacatatcccaaaactccatccattttttgtgactggttttgaaaactagcacttgttgcagtgttgtctagaagaatacaacattttgccggtttaccaatactggtttacgaataccggaatcaacgacaggaaaaaaatatttaaaatgcttagtttgaagtcatactaataccggttccatattaaaatgcttaatagggactacgggcccaatataaaagtgtcaaggcccatgtaaaactttacggagttcaacgttaacggtaatactaataatcttaacggtcgtcgtcagagattcaaaatttgaacacaaaacgcagaaaaggaaaatcaaataattcctccggacacgcctttctcttacctcactctcttttatctttctttgcgttaagcttttcaatttctacatctacaaaacagagagacgatttgcttccaaataattatggatgatgttcagatcgatgatacttttccggtggatctaaatggggttacgtcactttgttcaccggagattcctagtttcgatttcgttagtgatgaaacagagaaattagagatcggagatacttccattgatgactgtgacgatgcattgggcgactccatggtgtgtgatccgaattcaagactggttcctactggtctcacaagaactaatcgcacaggttcgattctctgactgatctttggttttaatctgcatttcttcttcgtttaggaaatttctggttttggatctgattgttttatccgattaacttgttaaaccctaggattcgggattttattcatttcgcctaattctgggtgaagatggatttaatctgatgttaacgaggagagttaggtttctaattcaatgtaagttatgtattgaggcattgatttttgttattggtgtaagcagatgagacaattatgttcataaatgctggaggagatgattcaaaggtattagattctgaattgaatatctccagagatgactatttcgaaggaggagatgtgttgagaacagaagagtctatagttgaagctggagactttccgttcatttatcagtcagcacgtgttgggaacttttgttaccagttaaacaatcttcttccgggagagtacttgatcgatttccatttcgcggagattattaacaccaatggacctaaagggataagggttttcaacgtctatgttcaagatgagaaggcaagtagaaacaactgaagatggtgtttttatttcatgtagttatgaatgtgagattgtgtaaatattgtgtatatgctgaaagaagtgtttttttttgttgtgttcaggtgttagctgagtttgatatattctcggttgttggcgcaaataggccactcctgttggttgacttaagggtcatggtgatggatgatggattgattagggtaaggtttgaaggaataaatggaagtccagtggtttgtgggatttgtcttaggaaagcgccacaggtttcaggtaatggctcttctctgtgcttgctttcatatatgattttaaattgttaagggaatctcaaagttttcagtttctaactcattcgttgcattactttacagttccaaggacatcacaagattttattaagtgtgagaattgtgctaccgaaatcgagatttctcctactcgggtactgtttaactagcctgctgtcatcttttttcctaaaaatatgtgttatggattacctgagcttcttcttttatgttgatatttgagcagaagagacttatgcgagccaaagctcatgacaagtatgagaagaaaatagcagagctttctgaacgatatgaacataagacaaatgagtgccacgaagcatggatgtcactgacctctgccaatgagcaactagagaaagtgatgatggaactcaacaataagatatatcaggcacgctctctaggtaatgaacttgtcatatatgacatgttatatctgacatatcaatccaaatttgttactgttatatctttttttgacggaggttttcttacttgattcggtgcttacttggaacagaccaaactgtgataacacaagctgattgtttgaagagtatcactagaaagtatgagaatgacaagagacattgggccacagcaattgattctctacaggagaaaatagaggtagctgtctattttttcaagtactgttgtatcagagcctgtctgcaagatacatgttcttaaacgattttttgtggaacttatgaaactgttgctatgcagataatgaaaagggaacaatctcagctatcacaggaagcacatgaatgcgttgaagggatccccgaactgtataaaatggttggtggagttcaggcactcggtgagtatgtccactcattaggttctaaagatggcatttaaaaggaaactcggtgaactaatacactatcaactcgtaaaaacagtttcacagtgtgaagatctaaagcagaagtacagtgaagagcaagcaaaacgaaaggagctgtacaaccatatacaggagacgaaaggcaatgaattttaactttcagattgatttgctttagcttctttacatcatactttaataatttactgatagcattcgtatatcaggcaatattagggtcttttgtcgctgccgccctttgaatacggaggagacatcaaccaagtctgccacaattgttgactttgatggagcaaaagatggagagcttggtgttattacaggaaataattccaagaaaagtttcaagtttgacagagtttatacaccgaaagatggtcaaggtagcgtgctatgtcatggtcaagttagatcattaagtttaaataacagtaacaattaacaaagtttctatctttgttgtgcagttgatgtcttcgccgatgcttctccgatggttgtttcagtcctagacggctacaatgtttgtatttttgcctacggacaaacaggaacaggaaagacgtttacaatggaaggtactccgcagaacaggggtgtcaattatagaaccgtcgagcaattgtttgaagttgctagagaaaggagagagaccatttcatataacatatcggttagtgtccttgaggtctacaatgaacaaataagagacttgttggcaacatcaccagggtcaaagaagtaagaattctctacctaattacatcataaacagatagggattgaaacagaagttgatcttaattgtatttgattttgctaccaaggttggagataaaacaatcctctgatggctctcatcacgttcctggattagtagaagcaaatgtggaaaatataaatgaagtctggaatgtgcttcaagctgggagcaacgcaagatcagttggatcaaataatgtgaacgagcatagcagccgctctcactggtatcatatatgcctcttttgctgtcttgtttgaatgtttgccatcacattatgagggttgtttaatattgtaaacccttacagcatgctctctataatggtgaaagcaaagaacctgatgaatggtgattgcacaaaaagcaagctttggcttgtagatttagctggaagtgagagattggcaaagacggatgtgcaaggtgagcgtctgaaggaagcacaaaacatcaacaggtcactctcagctctgggggatgtgatttatgctttggcaacaaagagtagtcatattccatacaggttcgtttaaacttgcataattaacatattccatattccatactccatctctgtggggagctttataccttgactgctttaacactttccaattatgaactttcaggaactcaaaattaacacatttgcttcaagattcactaggtaataatcttcatgacctttgtttaagtatcatcaatccgtgattacactgtgcttctggtaatctagtgtgtatgtgcaaatgatgcaggaggtgattcaaagacattgatgtttgtgcaaatcagtccatctgagcatgatgtgagtgaaactctaagttcacttaactttgcaactcgtgtaagaggggttgaattgggtcctgcaaggaagcaagttgataccggtgagatccagaagttgaaagcaatggtatggcttatgcaagtttttctttttcttcttcttggatttgcctttttgaattgtgtcacagattttcattattgcttcgtgtgtcactttcaaaggtggagaaagcaagacaagaaagccgatctaaagatgaatccataaagaaaatggaggagaacattcagaatctggaaggtaagaacaaaggaagagacaactcatacagaagtctccaggaaaaaaacaaagaccttcaaaaccaacttgattcagtccacaaccaatcagaaaaacaatatgcacagcttcaagagagactaaagagcagagatgagatttgtagcaatcttcaacaaaaggtaccttctcttttctttcatttctgcttaacatttccacgattaccattttatggctaacagaaatcttttttcccattaaaggtcaaggagctagagtgcaagctacgggagagacaccaatcagattctgcagctaacaaccagaaggtatcttgagatcaatatttattgttacacaaatctcactatactttgttgagagttaccaaacttctcaaaatgatgcctgcaggttaaggatcttgagaataatttgaaagaatctgaaggaagctcccttgtgtggcaacagaaggttaaggattacgagaataagttgaaagagtctgaaggaaactctcttgtgtggcaacagaaggttaggagtaggactgattcagtctcaaacttttcatcttaatatcaccattttgatattctattcgatatggtgtcccagattaaagagttggagataaaacacaaagacgagcagagccaagaagcagtgttactacgacaaaaggttagtttcatggattatctcgggattttcgagcttctgaattcctgatatcagcagatgtttaaaagaaattgtattgtttgtttgcagatcaaagaacttgagatgaggctaaaggagcaagagaagcatatacaggaaatggcaacaactagagaattccctgaagttgcaaacgctacgcctaatgaagtgaaaacttgcttcaaagaagataactttggcaatgagaatatggaatccaacaccaacatcctgagaacatcaaaccgtctcaagactaaaagacacgattcattaaatctcaatgagatgactagaaagaagagggcctcgagaagcggcgaaacagagaacaatggtgatgatcctcaaatgaaggagaaacggatcagaaaatcagacccaccaaaagttttctccagagtagtcagaccaactagaacagcttctggttcatcaagccaagtccctgtggctcagaagagagttattaaaagagaacaacaagaagttccggtcgtgaaagagagagactccaagaagaagatttggtcaagataaataatataactcagtaccatagagaaactcttaatctcttgtggttctctatatgattctctgtattaaattgaaatatcaatacttcttacagttttcaaagacatgatcacattagtatttcaatatcaatacacatgcattaaactaaatttgcaaatcatatatacattaatatatatagtcttattacattcattcacattacattcaaataaataaatttaaaccttcttctacatgaaattatttttaactctatccaatttattttctcaagttctaaaaggactttcaagacgaatatagtcatacataataccttgaaatggtgttctacttctggtttgagttaaaaatattgtattatcaccaacacttagtaaatttccagcaacgtcgatactatacaatctatataatccatgaattccatgtcttgcgatcgcattgtcctttccgataaaaccggttgtgaaaatcgcatcggatttcggatcgttgattcggatttgtagttccgaatcagctgctgatgctagagctattcggagtgtgtagcgtccgatacggttcacgttttttaggttgaatatgatttgccatgttgttggttggtatgtatcgttaccaacgtttctataggattgaaacataaagatagttagatatatactttgaatagaagcatctaaaaataagaaattaaatagttatgtatgtttttacctcgccacatgtgcaaagaaccaatcacttctataatcacttacaccgattgtgtagacaagatcgttttgagggtataaatctgcgtaacgatcccataatccatattgcctaaatctgcaataattaggagttttgaatttggtcaaactgaaaaaggaaaaaaagtttaaacaaaaaatcaaccaaattaaatttctgaacttatacgaagatatatcaaaactagttttacatgcgaagattatatatagtaccaacctgtcttggagtgggttgacataaagcttattcatcagtgtagggtaaggatccggtatatagaattcacctgcggttcgatccggtacaccgatttcccacaatgttggaccgtttctcggcggttcatacactaaaggccctacattcatctcgctacctgcacaccccaaaataaatataagtatccatatgttttccaaaagagagttgaattgaatatttagtgaacagtgagatcaagcatgcttctctaggctctagctatgatctaaaatgggtttataatggataagtgtaaatatatacctggcgtgatggtaatgttttgctcatacttatagtctccaataaaaccagacccccatgcgtagagactataattgcctgccctcacattctctattatgaatctccctctcctgtcagctttcgtccaaaattgataaccctttttgtcccaaaaagaagaaaaaaataatacacactaacaattaattacagtagaaagaataatttatactacatttgtatagagtatgagttttattaattattatcatacctttgattcggtttgccatgaaccagcttcaccaattggggccaaaccaacaaaagcaaattttccatatatctttaaccttgacacgtaactacaacattgtataatccaaatcaaaataagattaaaacaatgaataacgtaaatatgtaagaaaaaacaaaaattgacaaaaattcatgagggttgtttatttacctgtctttgattaagaattgaccttcgagagttcctctttgatggcgaagaggataatcttctgaagttataaaatcataaggccagcttttgacttctgcagccatctgcgacaattagtaaccattttatagaaacatgaaatgaaaacatgttaatataaggaactatatatataatcgttcatgtgttttaaatgatattagaaagttaataaggaacctgtcgtttagcatctctccagagacgaagagtagaatctttgggagagacagagttgagataagccaagacaggaccaaaaactttcttccatggctctccatttctataatccattctcatctcttttcccgcataatgcgtgctcgtaaacatctacaaaaaacacaaatattttagggaaacaatgttattaacaatttcaaaagtatgtgtatcgtaattaacaacttaacgaaagtcttgaacaatgagaattagcaatcaaaacctaattatttatcaagatttgtaatttaagtttttttgtttttttaatgtatgataaatggactcacggagagtgtgatgggtccggcatgagaggtgaggtcttgcttgatggggccaccaagacggaactcatcgctcggagttatcatccaaaacccaacaggtgggtctgatgagatccaaccatgcacattgttgtctttgtcttccattgagtacatatacttatcatccacctgcgtcacaccaacatcattctcccatataaaattagtagtttcataatttgtgttgttttaacaaagatataaaaccaaaactatagtgatgtaaatgcaatgtatcattagatatggacttatatatggagtatattacaggtatatatacctctcctttgaacatagggttgcttggatttgtcaaaagaacagcttctttgtaagctaatgacttagaattttctcgatctgccatcgatggcatgcttctctgccgatcatcggatatcgccatgaaatcaaatctgtcaaaagtcacaaacaatttcactaaatgtactagtttaaattggcattgaaaatataaatataactagtgaaaagcgtatagttacttttttgggttgagcttgaagacaatcctgatttggtccatgtccacgtcgggccaaccttctaacctctccaatataccgtacatgtataatccggacacaccacttcgaataatatatctgtaggaaaattttacattcgattatttatttactttggaggtcataatttttaaatacacaaaatatctataaattaacgatgatctacgtaccttttatctacatttagggggaccaaggagccacgtctagagatagtccacgttcttgtaaatgaaatttcaatttgttcttcgttctgagttataatttcaaatttagttccttctaatctacgaaaaacacacaaattagaaaaaaaataactgttaactttacatttataaatatcatcagatacatcgagtttattgtttcattattatatgttaaatatactgaaaaaagattattatttagagtataaaattatatcatcatagtattgaaaatttgaaataaatatatatacgtcacgttaagcataaaaagttataaaattgactaggagatatattacaaaataagacaaggagagtctgcaaaactcacttgtcagtcttctgtttcttttccggttcataccagactacgtcccaatacctatttccataacaatacgccaaaagtttttgcaattagacgttattaaaaagttatgtgccgtatgtaattatgtttgtcttaatgtaacatgttccaaacatataaagaagttgtgttacaaactcgtatgttaaaagactaaaagaatcttacccgcgatcatcaattttgtcgtccaacacattatcgataccatggtattttatcccagttattaagccttctgggttcgagaaagtaacttggacaataccattatcaactaccaccttaaaaccaacaaaattcttattatattatgtataatatatatatggggaaaaaattgaataattcttaccgtatcatggccaactctccttagctgaactgttaaggctggtatgttttgtccaggctttgtgatgttaagtttgtttctgtaatagaaaaagattgtagcaaaagataaatcagttagaccaaatccgagagagagtagatatttttggattagaatctttcattattttatttaagtttaaataatatgaacctaattgttaaatataaatttaaaagtatttaaaatagctttaaaaaacacactcgagttcttagcattaaaattacaaatttattggtccaatagttctaattagagtatattatatgaaaacaaattaatttattttattcgattttttgaaatggttgcctatatccatgcaatctaagcaagatagtttttggtctactattcagagtcaaggatctgaaaacgagttatttcatatttgtttgggtttaaaaacttcaacattaatactgtagcagttaaacccaaacaaatatgaacggtcaaattaattagttgaagagtgttgaagacgcaaagaataattccaaatgaaggaacacaaaaatccatcatggtattgaaaggcataaagaacataaaagtactatataaataaattaaataattaataatttgttaaaaggaaaatataccaaaaatatttgtattatgtgtgagagaaccgagacgaagacaagtagtttagagaaaaaagacaagtaggttttgagccgaaaggtaaaagtaacccaatatttttccaacgttgtaattaaggataaaataaacgaagattgaaagttgaaacttgaaagattaataaaccaattccttaaaacattgtattcttcgttttttgttcttttttcttttgtcgtttaacgttaatagtaactttttaacacatgtctcgtgatgatcttggtttccagattctcctcttaagatattttacgttataaaatttgtatgtgatggtatatatatatatatatgtacgtgtgttgttagatataaattcaaattaaaaaaattagccaaacattgtcattaccaacgaaacttcaactatggttttggtaaaccatttgtcatatagtcaaggaaatcaaaaccattttcataaaaaaaaaaaaaaaaaaaaaaataccttaacaagttaaaatggagatggaatcaaggaaaccttagctttttcttttgttttttggttattgaccaaaattaaagctaaccatttactttaatcatactttcatccttagtttttttaatggtttaattcatcttaaggcttacaattttacaattatactcagtgtatagtttcctcaagaacagaagaaaaagacatgtgaaaaattacaaaatagtacaccagattctgatgaaaaaagttaagaacctctgattgtttgttccctttcagtaagtttgacatgtgaacttggaaatttaaagcttgtgaaatcaatttttgcgttaaaaacaaaaataaggtaaaaaaacactaattaatgggtaaaaacaacccgacccgacacaaagagagatgggttaaagagaaaacatactgtgatctctgtgaatgaacactttgaagaagaagaagaagttgtagaagaaaaacttgaacaatgatccgacccggcttacttgccggagctccaactttcatctccaccacaattcactaaacttccgacaaagaaaccaaccgttaaggtcgagatacgtatatcaacacaccaatatacatagacaaagcaaccttctctaaggtttaactaaaaaatgcgtttaattagaaggaaaaaaatctgcaacaaatgaaaaaactattcaagtgtacctttaagattttcttctgtgttgggtttcttgggaagataaaatttggggaatgcagaagaagaaagaaatcttttcctatgaagaaggtaatctctctctttgacaaaaaagaagaagaagaagaaggtaatctctatctctatcttctctctaaaatgcactgattattctttttttagttcttacaataatcataggattagaatcttaagtagctttatatatctcacagaatctgcattcagatgtgtgggggacgtgtacatagaattctgtgtctgtatgtatatacagaatatgtatatgttgcatatatatctaaatttttgggcatacgtaattgatctagaccatcttaatgttgcaggtgtgactttttgttgcctaaccttttcatctttaaaaaaataataaaataaggataaaatattaaattaataaaagagaaatatcataaactatttttcaactaaacaagtattataactaggtaccctaattatttgcacaaaaaaaactaggtactctaactaatacattcatcatataaatatattaaaatgtagactttttttttgtcgaaatattaaaatgtagactgtttatcaatattacgaggcaaaaaaaacaacagaaattcgaaacgagactttgcggtaaggaaatgggaacatcgaacatgaatgaaaatccgaatagaatagaaactgaataagagttttgtaatataagatttgaaataacttataagtacccttattaccacataacatttcatgacattggggtaataaataatttgaatataattttttttatcctaaatagaatatgaggaatattccttcaaaagaggatttaattagaactttgtcacaattggaaacacattcctatatgaaacggaaatgtgtagatggaatcgagacaggacagaacgtttgtccatcctaaagaacatttaccaataaacaaaaatctaccttcatatatattcatgtcgaagattttcaagtttaaccttacctcattgtcccatgcgcaaaaagtttctgctccttttgttgtcgttttatgatgtaatgaaacttgttgaacctctgcctataaattcttgtcaagcttcacatcaatgttttggcatttcattaactcacgattactgtaacgtctaaaagctaacaaaaatccgtttgtgtatggtataaactctacatacttgcatattaacacaaagtaaaaaaagataaaattattgcatttacatatatacaattgtataagactgccaaaatatacatcggaaagctgtttttattgacatctaatgtaaatatccaagaaatggctgccaaaactacgtcaaatttttttctttcaatatataataaattttgtcaatcggtcatatcacagaaaaaattcgtcaatcggtcagagtacggtcaactttccgtatcttaggcgaagtaccaagattaaaattgtaaagaaaagtaacaattaccgaaatggtacatagattttctcttgcgacgacttttaagagagactcatctatataaataactagaaaaatattatactgttaaagtcagtgtaaccaaaacgatgacttatgcactgcctgaacacccattcaaaaaaataaattaaaagggggtcaaatttcaacaaatatccatataactagatttttatccgcggtacaccgcgggactatatgtttttatacaaaaacaaaacatttaattggtttagtagattaaaaatatatataatgtaatatttttttctttctaaatatacaattcttatatatatatatatatttagtgtaaaattactatgtttgatcattactgtttaaaaatataaaaacaataacatacagttcattaagttaaaatctaaattataacaataatttaaatttaaattatatttttttgttagtattgtttcttttgtatagtgttaaagataatattattgtattttgattgttatatttaggatttcatctgtgatataccgtctcgtattactatcgaccaaacccgtcctaccatttaatctcgttcagtgaaattaaatatatctaatgaatttcacccgtagtataccgtctcgtattactttcgatccaaacccgtcataccatctaaccccgttcagtgaaattaaatattattttgttatttttgtttcaataatattttaatttaaagatatataattcaaatcaatttaaaagatatataattcaacagatatcgtagagtagaaatctcggaaaatgtatgttgacagtaattagttgatgaaaaaaatctgggattatagatgtgtgaataaacctatgtagaattttttggagagatttttggaaacgtttgttgagcgcaatataaaatatggaaattttcaaatatgaataattaaaactacttagatatcttgagagatttttggcaactattattgaatataatatcttgtatttaatcattaaaaacaaatatttaatgtcagtggcatacaattgtaaataagttcttagtagaggatttatttgttaaaatgtctgtaaaaatgtatatgtagatttataaagaattatctctagtcatttattgccgaacttgtaggaaaatggagggtaaacttctttttttcttcttcttcaagtaagtgcacacttctttggtcgatttcaattatacaacttgagaactgtcgtcaatcattctaacaaaaaaaatcgaccaaattttggatttgatattatgttatgaacataatcatgacaccagtatatactattaaattataaatttcagttctacatacattatatgtattactagatctataaattagtatgagtacaaggatttggaaaaaaggttaacaaatcatatgatgggttagttcgtacactatcatattggccaaacaaaatgatgacataataccgaaataacgatcttaatttgacttccacattgagatttaagactgtatatccagacccaagaagaatattaagaatacattttcctaagtataggctatataaaaatcgcataatatatatgttgacaaaaaagttctatggtaattagttaataatgagatgatctaactctactacttttcaattacttttcaattacttttcgataactttaagtgattttgaggcgttactgcagttgaaagttgaatgtttctagcttccttttgcgaataacttttcttacacaaattacaaatacaattcttgattatataagtcatatacatatacaagatacttttatctaccatctacacacggatataatctctaaccattggaaaagttcttataatactataactatatatatcatacgtagaaaaatatttaaatcaaaagaaattgccaaaactaaaacttaaattaaagacatctcaaccatttataaaacaaatgatggcgcatcaagccgactgccgacccactatataaatacaacgattcaaaatagttaaataaacataagtacataacaaacaaagacacatttaaatatttgtggctgtaagcaaattagagatactataatagttacacgatacaaaagataattaaaaaatgaagattaacataaaaagcgaaaaagacatatgtacattacattatgggtattaatatagtaattacggcaaaaatgcgttacaacgtcgtggtttcgttggtgcatgacaaaaatttcaaagtaggttagttagaatggtggagagactattttatttccaattttcctcttttgaaaaaagaacaaattcacatttaattttcttatttcaaaagtcaaatttggttgagttcttctttccccgtaaccgtaagttttatgctttttcaacgcatcgtaaggttaaagttgttgaaacgcatatttagctttgagtatgtagttttatttttccttcttctcgttaatgatattcatattaatatagagttggtttgatattgttgagctaagattttgatattcatggttcttattctgagcgattgcttttttgatatatagtaaagcctatctaaactggtgattcttttttcatttcaactttcacaaatcgcaatttagggaaacttatcctacaaaaactcttttattttcgtttctataatagaaatttaaaagataagattccttctttttcgttcgtgttttttttggtaagttggtgaaactttcaagaaggacttcttttctgctataatttcaagaaccacaaatttatgtttcgtacaagattttacctagatattcgtctactgctgttttagttagcttatattctactaatttcacataaataaaagtgaattattctagttattttgtattgtgtttcttctaaattcgcttgcgactaactccggtgaaggattaaaatagattgtgcttctagaaaatttattaacgatatataattataaaagtgaagaagaaaaaggacaaagattagtcatgtagatatcattattgaggattcacaagacttgcttatgtcccttttgccctttacacatttgtttctgtctactcttgtagattctccacataaatgataacatgtgttctcttgtttctgacatattctctatttcatttaacattttttgttgttgtttctctgttaattaagctaattaataatttgagcgtcggtttcaaaaaacaacttttttctacgcatgtaaatattgtaaacatgaataatcaggttttacaaacttgctaaacctatacaaatgaaaacttgaaaatttgatggagtatgtatagatataatcttcatttttggtattaaattcaggttaatactatatgcaataaaacaaaactacaaaaatgaaaagtgagtggatccgcaataaaaaaaaactaattatttacatacaaaagttattttgtctctttgatctccaaagaatcaaatttaatctgaaaaaagatttttctataatctgaaaaagatctagactttttcttcttctaaacagatataaagtatctggtaatgcctaatcacaacagtatgtttcatagtaggcctttggccggcccgtgagtccaagaagagggtgtctccatttggacgatttctttgttgcggtccataattcataagccgtatattagcatagttcatacttacccataattggaatggtataagtgcggactattttagttccaaaaacatttagaaaatgttgtgtacgaataactttattggttaacgcaattctgtatccatatataagagttaatgtataaaatatggcaaatcgaaattgttaatgaattcaaatattgaactcatggccaacaaccttggaacatttagtacaattacaaccagtgttcaagttccaaggactcaaatttcaaccttcaattaagtaaactatgtaagaactcagaaaataaatgtaattttatggagtatttggaattaaaagcatcaaatggataatgataaaaatgagttctctttatggtatgaagttcacgtgaaagagtactaatctcgaatgtatcttagttcagtaaactggtgaatccgacaatagttttgtagcataatataatgacgaacgtaacatttgtatgataatgttgcaaaaaatagtttttctcttcttcttctttttttcaaataccattcaaacctgcgaaatatagacttggccaaaaatattatagtactacttttgttttcgttgtatcgttttcattgaattttctttttcaactcgtttaattactgaatattactgtaattaccgatcaaattcatatatatttccaaaaagattaaattaattttttatttttatgagaaaaccaaaaccttttttagaaggatcaaaatgggacattgacggctgatggttgacatctggcaggtagatttgtttttgtttttctttttctttttagtttcattttaaggataaacattatcttgtgttggagactcgagatctgattggtcgaaagaaacccacgtggtcaccatgttgtcattttaggtcccacctaaactcttcgatagctttaagcctttaacagtagtgaatctagtgatactaaactttactaattaggatttaggaagaacctgaagcgaattcacttaaagcactagattcaaaactatgaagcatagaatagtaatttaatatctgtaagtgataaactttcacatgcactataataataataaatgatcatattttggtaaaactatgatcgagatccctcagaacttaaatattataaatccttcttttggaatcaaactagtgtttcttagtttatatgtaaggccacattttttatcgaaaaaaaaagtgaaatatatctgaaatctgatatgtactttagagatttatacattttcacatgtattgatcgtttttatatatttggccaacctatgatcgaaagctcaaaaactgaatacataaaaaaaaaaatatacatgaatcaagaaacttgatttcttgattctatcattttttaacctaattttatttcatcgtacttttttttttttttgacaattcccttactcttaaatcttaactcatgtatccttagaagttttgcattttttggtccgaaaagcttctccactggatcagttaccattggccaagtaagtttagtatcctcaccaacatcgaaaatcgagatattattgatgcgtatttcttttgaaaagtctcctttcaacaaaatttaagttgtaaggctgaacattataggttgaaataaagaaattgctcaggtgtacgaaatttaagccgaggacaaaggagcgtgcgaaagcatctcctaattggtatcctcaggaactgtttctgctactctcacgtgtatgactctcacaaatttgcatattccaccatataatatacaatatattatatatatatatatacttacatagtttgatagttcaaaccaaatagttacaatatagacgacttgatattagttggaattcgatggccattatcatattaattgaaactttaaaaccaaacgtaaatccatttctagtttggtttacttggaatcgacggtactaaaaaaaatttggtctacagatgttgtaagtctcatattgaaaacggtaagtcaaataaccaagttatatttttattaagcatatattgtctgcgtaatgagacttaattaggtcatttagttcatgtataatactgtacataaagtcaagtaattactagtacagggtaaattaattaagttctaattaacgagttttgctcattctcttatatgcaaaagttcgcctatatggaaacttgcaatagatcttaatatattggtagaatggaaatgtcctcaactcctaatttatgtgtgacacgtgttaataaaatcaattttgtattttgttctattatagaaaactatcatcagtttttaatattctctaaaatccatctaccgttttcaaagcttttttcccgttatatattttacataatttttttgggtaaaatggagatatcaaataaaggaagtttatttgtagtagtatacatttcttcggtttcagttttgattcagaaagtttattttttctatgtaaatactttataatactgttccttctgtctcatgtgttctatgaactatgtgtatactgtatacatattttaggttattaacttggtacgattactaattagccctcaagctgtatcgaccaacacaacgactcaaatagataaaaacgaaatccttaatttattcctcgaatacattgttgactcttacttccttcttatttttttcttttccttttctctctctctattctctttctcctgattcgttcttcttcatctttctttggccttgcgaagatctagaaaaaccctagaacgcaccaagatctaaaggaagatcaaaatagggtttaaattaatggggagagggaagattgtgatccagaagatcgatgattccacgagtagacaagtcactttctccaaaagaagaaagggtctcatcaagaaagctaaagaacttgctattctctgcgacgccgaggtctgtctcatcattttctccaacactgacaagctctatgactttgccagctccaggtttctctcttcctttattcaattcttagatcttttaacatctacatacctatagatctacatctatctatgtatttgtatatctataataaatggaactatatataggtatgtacgtacttatataatatcatgtgtgggttcactacaagaatataggctatttctctaagagggtttggattaattcaatgatttgtgtttggtagcgtgcatttagtcatttgtagtagtatacatttttctgcatcttgtggcgataacgctctctatatttctgtgtatatatacaaggtgataaatgtatgagctaaggaaacttaattttcaaaggaaacttagtttgaaaggagcttaggatgccaaagcaaaagaaaactaattaaagacgatgactagtgtaaagatgaaaacacacactaatttgaagtaggctcatggcagtgtgtggacatgtgtgtcattggttgtaaattgtgtatgtggctgacagtgtgtctttgccaaatttagaaacatttgagtagagaagatagtaattaaagctaaaaacaagtataacgttggaaaactgaaagagtgataaatgggagtgtataagatatcactacaatcaattgtgcatttttaaggatatatcatacatttggagatgatatatgtaaactgataaaaaaattacccatctacttgtatataagcatataaatctcaatattttgtatatatgaaactacccaagaacgataagatgactatgtattttaaaccataaatgactgcacaatttattatgacaaaattttgaagtattacatgagaatttttttttttcgtttcagattttccaaatgtgaagtattcatatttacttttgaagatcaaatttatcatgtgtaaaagaatcttatatatgtataaatcatcgtgaatccatttcctgacctatatatatatatatatcatatttttcttatgtgataaaaatataaagccttcttaataattttaaagattgtgaaaaaaaatcaaggaagtgatggattttgtttttcttttcattagaaaataattttattttgccacaaggaagcaaacattatgaaatgcttataagttgaaattcttaaaatgaacagtgtgaaatctactattgaacgattcaatacggctaagatggaggagcaagaactaatgaaccctgcatcagaagttaaggtacgtataacagaaatcacgcagcacataagaggggaaggcaattattagttaatatcttaatcatgtgtttgtattactatgcttgagtttgagagttgatcgagttagattgtgttgcgtgttgtagttttggcagagagaggctgaaactctaaggcaagaattgcactcattgcaagaaaattatcggtatgtatttgttcataaactacaaaactatgagtaatcatgtgtttctaactccaaagtaagaagtactgatcttaattgtatcctttttgctaagagttgatcttttctcacatgatttctaactaaaacttttctctttctaattatttttgtttaaaactgttcagccaaaatttgtgcatttaacataataaggtaacaaaatggatgttatgcgcctaatatgtttaaaacaatgtatatatacttcatcgagtcgattagagaaagcggattaatcctaaaaaatttgcacaattgagactaactttaactttgcactaccagatttaataaccccacactctatcatttttctttaaaaaaattatttcaagaatgatagatttggaaccaattagttcatacctagtttcaatggtgtaatctcatgaagattcatccgttctctttaatctactcgatgagattaattttctttgaattaaattttgttattttttgctttcaagtattttccgtttaatctacattctagtactatactccggacctctagcattttatttctaaaattttctatgtaaactttttcctccggattgtacaaccaatcacttatgtgtttaagggtaagaaaaatatgtatatgttgaaaactcgaccatgattgttctgtcggactggttcatttctgaaattagtcgagcggattaaattggttgtagttggccatgtccgttctacatatattaactgcagtaatgttttgtgataaatcaggcaactaacgggagtggaattaaatggtttgagcgttaaggagttacaaaacatagagagtcaacttgaaatgagtttacgtggaattcgtatgaaaagggtaatatatgaatgctctaggcctctagctggttcgcatgatgcttaaaaattgataatagagcattgaagtttaagctaattattcttttcgaaccttgcaggaacaaattttgaccaatgaaattaaagagctaaccagaaaggtaaactatatgatataacacatgattattaaaaatcagactcggatgttgttgtttgtgtttacattgtaaacacacataatttgcagatgtaaaatgcaaacgatatttttagtttcttcttcggtttgtgtttgcatttgcaatttacaaaaaaatctgttctttgagaaaagatactaaagatgttgtgtttaagtttgaaacgcattattaatcaatgttatcatttctagttttcaggttcttataagtgttttatcttttgcagaggaatcttgttcatcatgaaaacctcgaattgtcgagaaaagtacaaaggattcatcaagaaaatgtcgaactatacaagaaggtaaaatagaaacacaaacttcattacttcaagttgcagctaacaaatcctttaaatcaaattaatctcctagttgaaactagacaaatctcaataattaattattgagatcgtacgtagttacaaaagtgtgttgtggtaatggtcttgcatacaggcttatggaacgtcgaacacaaatggattgggacatcatgagctagtagatgcagtttatgaatcccatgcacaggttaggctgcagctaagccagcctgagcagtcccattataagacatcttcaaacagctaagatcatataagagatatataacaaattgttcgttcttgattatctcaaaaccctttcaaatatatatacgtgcatattatatatgaagactcgtttgactatgtcaatatatatgttttcatgcaggagtaagtgtgagtgtaatcatgtcggagagcaaaccaaaggtttgatttgtacgatatatacttatatatggtctcaagtgaaagcaatggaacagcttctcgattatattctttttagctttcacatttggttttaagtacataattaagacatacatgaactacatatataatatatattttaactaaaaaaattgagtgtgatataggttggtttagtatataagctatactttacctaaagtaaaatcagagctcacttttgtgtgtgtgtgtttgtttttgttagtcattgagatttttaataaagggagattcatttgagatgattgcttctatagtttagagaaaatttgcaaaacaaaaagagtatactatatattgtcgtttcaggtaaaacgatgcaaaaagtcagcctagaaattaacgaagttacatgaccatgaccaacatatgaaaactgcattgtttaacatatctctgaaaagattatgtttttggtcgtattaaaataacaaaaacgaagtaaaaaaaatctcagatgtgaaatcaaactaagaggagctaggagaagaaaaataaaccctaatttccttgggatgtaaattttcaccggtcgtacaatataggattttatgtgattcaaaattttagtccaaaagtagagggttataagtttctcggtttgaataaattaatttagtgattttgatttagcgcttaaatttgattgtaaacacagttcactctattatatactattgtccaatattttgcatactgtaatccacttttaacctacaaaaatattgatataattagtccggtttactgctaattgaacaaccattcaaaatttgatttgttgtatagacaatgagttatgcctcatcagaaataatcacaacttaaaattattctagtatgatgaaatatgtgttctgttttgtaaatattatagatacaacctataaatagttatacaagttacaaccaatgagcataccgaataattcacttgactttaaaacaaacgtatcttgaattcaaagattaaagattggttgtaatagtatatatgcacgaagaaccaagaattgctcaatttttaattgatagtgacatttgaatagaacgaaaaagattgaacactaactaagcaatctaccaaaatattaaaccaaaccacataatatcaaatatcttaaattataaaatagcccctatatttcctctttatctcataaaacacccgtttcttcttctaatcttaacttcttcttcatcaatcacacatcatctaaaagaaaaacaacctacgataaaattcagaaactttttctctgagacaccaaaaaaggaaggtgaccctccttctctaatcgattgcttaatcatttctgccgttggattgaatcgaaaaagggcgaattatttaaaaagcttcagaatttgaaatcgaaatctgtgagtactgttgtgtttgtggaagagagagttttggggtttaataatggcgaaagctggagggatcacgaacgcagtaaacgtaggaatcgctgttcaagcagattgggagaatcgagaatttatctcacatatctctcttaatgttcgtcgtctcttcgaattccttgttcaatttggtaaacctcactctctcacttatttctctgtgttgggttttgaattcaattgactaattttggagttttctcgatttcgtatttgctaaatttagaaactttgttttagagtttttgtcaaagtaaggtttttgatgattgggagatttgattttggtggttggttagtgaaaaatttcacctttttaattgttgagatgatcagatttcatttgcatttgtatggtcttagatccatgtgctaagagagatctttgtaatgatctctttgatcttctcagcttcaattctagctggttttagacaatgttgtgtgtgatgaaactttcttttatgagctaatttgattatcgaagtcattgatgtctgtgagtttgtaatttctctgtgtgtttcagaatcaaccacaaagagcaagttggcttctttgaatgagaagttggatctgttggaacgtcgcttggaaatgctggaggtgcaagtaagtaccgcgacagcaaatccttctctgtttgcgacgtgaaacaccgtagacgatatcgaaatcgaaaccgagcctgatcctttggctttaacagaagaagtctgttgttgaatgtgtaccattgaatgattctttctttcttcacatagctgtggtagtaagtaaactagtagcttaaaatatgaatctattcataaatatgtgtatcttttttctgtccattaagatctcttttgaatgacaagtcatttcgttgaactcttgaagtttttgctttcttctgctgttgatttataaactttgcagaggtacccttttcatcttctatgcatcggatttgtatattcgtcttttctcttaaagtggaacacatgtaaaacgctcttgttgcccattttttctttttcatcaatggaggaagaaaaaaccgaaaaagctcacatctcttttcctccattagattctgtctgcatttgtgactcacattgtttttttgagttccactcggattcatcgagaccgacctaatcgtctccacccgtacgtactatgagatcaccccacggatgcctacgatatccaggggtcgcggaccaaccatagaaccaagccattgttgaaaatattctgttttacgtacctaaaccacaaagttctgtagactatggatgattgaccatttttaaaaaaatattctgaactcagtttttgttttgtctgaattgagatttgctgtgttgaccaagcttccaagcttgaagctgcaaacaagagtgagaactgagaagtaaacaatggtactcttattgtctgtttttcttccaagaagttagttcagaaggaagtaattcttcattgcaacttaaaacagctttagacatgagtttcccaagccaagcatgatagagtagtccccttgatccgagccctgaaaatacccagaagttgcaaaactgaccagcacctatgagctgattaacacatcccaagagcggcagtgatccatggcttgtgacaggtggcattgctctcaagcccgcccttgctcccgcaaattcccacttttctatgtctggataaactgcacttgctttcggaagaagctcgttgagagctcttgaagcttcctctgctgggacatccgatgaataatttcttgattgccattcccatgtggatcccatgtgcagattacggggtccctgaaccgcgagccacgcatctgacaagatcgaaggtccatcgtccgggtaacttcctctgcattacataatttaataaagaaaagcttttgaacaggaaaaaaaaaccacaaagataagtagctgagctcaacatagtaatgtgcgagtatgcgactacatcaacacatactttctttttttggaaggtctcacactaaaaaaaaacagagaagaattgtacaattgaaagaggatgtaaagttgacatcagagttgaaaaagaatactaggaatggataactataggcgcaaggtctcgcaatacctggcactctcgtgtaactgcatatgagtaatgacacctcggcatgtccttaaagggagctttccagtaagccctggaagaaagtctaccttggatccaagacatattactactgcatcatatcctcctacatataacaacacaaaagctgttcatactaaatttctgaccatgcggatgagaacctcagagaaaaagcatggatactatactcttggattgttaacggctatctaaattgtgtttacggtctctagatttaagtttatcacatcagttttcatgcctgtgaaacttgatccaaaaggactagttgtggttggaggatgtttctataaagcttacgcaagttccagaattaaacaaaaatataagaatatagttcaaaatcattcaccttcaagttcaagcacatcagttatagacttgttcaccaaagttatgtttttccttcccagtgatgtttttgctgagctctggcatgctagaaagagtgcctagagaagggagaaaaactcggtaaagaaaaacgcaaaagcttggtgctaacatatttgtgttgtcttaacctggagatatcggtgcggattaacattcatagctcctggaaaatagaaggcgcagttcaaaggcaggtatagattggggacgagattttgtgcaccatctttgtcaatagtctctactacacaactagcaagacagtttcgagcattctaatcgcataagtaataaacagtaaaactacgggtttagttaatatttcaaaggtatctaagtcgagttcaaacttacatcactcattaaatctaaagtcttggcatttgttgctggtctcaagattcccctaaagcaagaagaacttggtcaaactaaagtatcattgaatgaacatttcaagttattagtgttattgagattggtaccttcttcgaaccataaaatttccgaaactctcgctaaagtctctgttctccgtagattggtaactagaagaagcagctgtttcagccacatttaagagctctaaacattctctccaacactcagcaccatgccaaagtagctttcctacataaagtaagaatctttatgaaacaatacaataatcaccaaaggggacaatttcttctacctttaggagaataaggatggaggagtcctccagaaacaccagaagcaccacctcctatgccaacttcatcatatacgtcaacacttaatctcagctcttttggactctcctgcaaaaacaacacatattttaaattcagaagcaattatctcacaacaacacaagaacaaaatcaaatttagagatttaaccttaagcaggtgccaggcaacagagattccagcaaaacctgcaccaaggatggcgtacctggaggaacaagaagaaactctaaaaatcacagtgagaaagatagagagaaacaaatgaagagagctaacctaagaggaggacggttgggaagagagagagacgccgaagaacaagggtgaagaacagcagtgatcatgtctacacgccaatgcctttggattccggcaaatgcttgttttgcctgcgacgagttcgttatatcggataactcagttacctaccactactgtaaaggaacctctgattcatctagagggtcttcttctcagggacaaatattggtttagatcggtacaagaaaaattctacatgattctaaacccggttgagtacattggattcgataatccgatgcgtatactacacgttaaaaagtacattgaattttggtttaggccttttctccaattagtttattttctgagtcagacaaggcgttacattattgttcgcctttttagttttattttatccattttcgcaaacgttaaaacttaaagacacaacaaaatatataaaacggagatatgattgaggggcatatttgtcattttcttgtgatcgttgatttcgaagtcgctataagagtataagtagcagccttgaaaagtgttgttcatctctcgaagtaaaacttttctctcagtgatcggataaaattctcggcgaagaagtgaagtttccggcgatcagaggtgagttttccgttagatccttatcctagttgctacttgtgtgacttcgttgattaattttgatctgaatatcaaaaatcgggttttaagattctccagagtcctgatttttctcatgcacatgatcttccaaaattcatagggcttatgcaattgattagataaggatcattttaggtcaaaatctggtaatcacgtattgatttacttagttgtttgcattttttgatcgttttgaaaggtgatatggataaggagaaggatcatgaagtggagtggcttgaagctcagaagatagaaataagcgttgacttattagctgcagcgaaacaacaccttttgttccttgaaactgttgataggaatcgatggctctacgatggtcctgcgcttgaaaaagccatctacaggttaataatataagtagattctgtgtttgcttttagatcagtgaatatttctaagtgattgtatgattttggtgatgttcaggtacaatgcttgttggcttcctttgcttgttaaatactctgagtcatcatcggttagtgaagggtctttggtccctcctcttgattgtgaatggatttggcattgtcacaggcttaatccggtaagtgaaaaacggaattatcggtaggaaaaactttgactttgttgtttgatgtttgagtgatttcttcattgatgtttatatccaggtgaggtataattctgactgtgagcaattttacgggagagttctcgacaattctggagttctttcttctgttgatgggaactgcaaattgaaaactgaagatttgtggaaaagattgtaccctgatgaaccttatgagcttgacttggataacatagacttagaggacatctctgagaaatcttcagctcttgagaaatgcaccaaatatgatcttgtttcagctgttaagaggcagagcccattttactaccaggttactttaaaatgattgttcttctcatcatcataaccggaaaatacggaattttcttcctgattctgtttctgtgtgttcgttgccacaggtttcgaggtcccatgtaaacagtgacatttttctacaagaagctgttgctagatataaggggtttctctatctgataaagatgaacagagaaaggtctttaaaaaggttttgtgttccgacttacgatgttgaccttatctggcacacacatcagctgcacccagtttcttactgtgatgatatggtgaagctcattggtaaagtgttggagcatgatgacacagattctgaccgaggcaaaggtaagaagctcgataccggtttttctaagactactgcacaatgggaagagacattcggtacaaggtactggaaagccggtgcaatgcatagaggcaagacacctgtacctgtcacaaattctccttatgcttctgatgttttggtcaaagacccaactgcaaaagacgatttccagaatttaatccaattcccagaggtggaagttgttgaggtagttttttatcattttctgtggttgtctcttccatgtattgagtttattgcagttgtgtgatccttttgtatccttcaggttctcttggagattatcggggttagaaacttaccagatggacataagggaaaggtctcggttatgttcagtaaaactcagccggattctcttttcaatgctgaacgtagactgaccattttatccgaggttggggaaaagcaagtagctactttccagtgtgaacctacaggagagcttgttttcaaacttatttcctgttcaccgtctaagataccagtttcaagagagcctaaaaacttgggttttgcttctttatcactaaaggagtttctgtttccagttattactcaactctctgttgagaagtggttggagttaacacccagtaaaggtagtcaaacagatacgaaacccataagcctgcgagtcgctgtctcgtttactccaccagtacgcagtccatcagtcttacacatggttcaatcaagaccatcgtgcaaaggctcttgcttctttccaatcattggaaagtcccgtcttgctaaaagttcaacacacattgttgatgaaacccaaacagaggtgatcacacttcaaattaggtatgacaatctaaacaacattctctttcgaaaaataaacgcatttattgattctggtatgataaaactcagaccagttatatatatgattttactttcttactttgtcgtgttttaggaactccgctgatggaggaatacttaaagatgatcagagacaagttatgggtgtgacagactctggtgaaactcgcgtgcttgcggtttatactggtagtttctggtctttgctggactcgaaatggtcacttaagcaaataaacgcctccactgcagataatccgctctttgagattttgggccctcgagtggtatattccaccattttattccagtaaaaagagatgaatcttcttgttttgacaatgtaacccagttcaatgatacaatgctttttattggtttgcaggtgaaaattttctcggggagaaagctggattatgaaccaaaacactgcgcaaaccttagaagtgatctagatttcatgactcttgtggaattttccaagcaacatccatatggaaaaactgtgggattggttgatatgagatttggttccattgaggcaagtctgaaagtttgatttaaccgggaatgttacttcttctatatcttgccatgctcattttgactctgatatttgatatgcaggcgaaagagaattggttgcttttacccggaatcgtatctgctttcatactccatactgttctgaagaaaggaggttctgaaggcttcaatgtcacaaccaaagatataaaagaggaaagcaaacagactaaacttgttgctgcgacagaaaataatgtgaatgcaaactctacgaatgtggagacccaaactgctattacagcccctaaaaaaggcagcggttgcggcggtggctgtagtggtgaatgcggaaacatggtgaaagcagctaatgctagcggttgcggcagtagttgtagtggagaatgcggagacatggtgaaatcagcagcaaatgctagcggctgcggtagtggttgtagcggtgaatgtggaaatatggtgaaagcagctaacgctagtggtggtggttatggggctagatgcaaagcagctaaagctagcggttgcgggggtggttgcggtggtggctgcggcggtggttgcggagacatggtgaaatcagtaaatgctagcggctgtggcggtggttgtaacggtgaatgcggaaacatggtgaaagcagcataatctggtagttgtggtggtgacctagtagagaatgcgaaaatgtggtgaacagtaaggtgcaaatggaggcggttgcggtgaggacgccatcatgtggcttaatatcaaaactgtaaattacaaataaagttgtactttgttgtttgtttatgcaatgaatggtttgtttctgttaattgccaaagactgtgaggatctgatccgaatgacaatttggcatgagctagaaagtaccacacatacgattctcttacaagctacgactatcatgaaaacagaaacaaagaagaaacataagacttacgagattaggtctcaaggctggctctacttacttgagaattcaacaatcatcaagaaatcgtccctatacttagatgattccataaactaagaagaatatgtcatcctaaaagaactcattaccattccaagactctgtatcacatgccaagatacaatcagtccatctatgagtgttgctatatgacaaagaaataattgattttagtgtgtctcttgctcttgcttgtttttctttattttttgtccaaacaaatttattgatgtaaatgtttggatttaaattggtaacaactaacaacacctttgttttggattttaattggtaatttattttttgtcaccggtaattttttttaaattcgggattttaaacctacagattcctttgagtaaagtgctttatatgagagctgtagttactcgacacgtgtcttaatacataggataccacacgtgatctacgtatgatcgcatgtacacgatctttgacttatctttccttttatccaataaacacatgctctctagagagtgacgttgtacatgtatacacttgtcagttttattatccgtcttgcttaagcagattacttaatcctacggctatggataattagttgttaatttgttattagtttaattaaacttttagttaaaaaacgaatacaacaaaggtgtgaccggcataagcggaagcagtgggtccaattgtcgtcgcactgccccgcaaaatctgttgctcaaagcaaaggttttctctatttgtttatttagttaagtttttttctttctttttactaaatattactcattacggatttataagtttataataatctcttcacgagtgtaatgattttgttagtgatcactgatcatcggtcatcttttgtaatcatcttgaattattatgatgctgattcattttgattttgctatgttcttttttcaaggttcgtatattttggcttttcagttaaagattttcttaaaaaaagttttgttaaatacacttaaataaagatttacaattagcacttaatttcaatagaaatttgaaagtaccatatttcaatgcaaattatacaaacttactctttttagttattaataagaatataagattacataatctcaaccagagatacaatcacattttataaagtttattcgttgatttattatgacttctaatgttttttcgcagctattcttatttacgaacagaaaaatcccttaccaacttactataatacttaaatggcaaaatcgtagtccttaaatttagctataacgggatgaaaaagtcatgcgtagcttagctttttgttggccacgtctttctttaaagcataatgtgtaaaagatatgattgtgaaagttcacactatattgtgcaatgtgtaagatcattatatactaattaatttacagcaaatgaaagaaaaatgcatggaatcttcttactcttttacctgcgatcatttatgtgcatagatcatttgggttttggtatgttttataatctaaatatctgataaccatcgataacatacaagcatcggcaattcaacatccataagtttcttgattgtcgtcatgccgtccagattgattttagtagacgatcatttcttacgttgactctctgctaacttacctacttgataaaaactacacaacatatacatcataagtaaatttagagaggatctagcatctcttttatttagaaagcaatgaaactctagcatatataaaccaaactcatgatggtatgtatagtggttaaataatttatcatggctgtggagaactaaagttcaaatttcaattatgacgtgaatgttttaaaccatgaaaatagggtaaatttaatatctataatgtttaaccataatgttttaatccaacattataaaccaaaccataccataatgttttaaaccaacattataatccaacattatatgttttaaaccaaaccataatgttttaatccaacattataaatgttgtgaaaattagcttaggatttggtcaggaatctccaagaatcaaaaaataattgtataaatttgattggtaatatttcgtaattgcataatgactctatttgtataataaaattttgcagaatgaaaagttgtaaaataaaaatttgtgtcgattagatacatttgcaaaaatgcggaataagattttatatcataaacaagtatatatctacatatttgtataatgaattgttactagtgtttttaggtgaaaacacaaattttctattttgttaaatgttatgcaaatatttttgactgataatttttttgtataattacgttagaaaatgtcattccgctattattatgcatattaccaataaaatcaactgtgtaacaactaggggtgtcaaaatgggtcaaaattcatgggtcaactcaactcaactcaacccatgaaccctaatgggttgaaatttttgactcaaatgagttgatgggtcaaatgagttgatgagtcaattggtttgatgagtaaaatgagttgggttgtaatgggttaatggttttagtggtttacccaattaacccatcaaattttgtaaaattgaattaaaccaactaaaatttctaaaccaatatttaaccaacacatctaaaccaatttaataaaatcatccccaaatttacaaaatcaatcgtttctcgacctccacttcgacctatactctccaccggtctcatccacatcggagactgacaagacgacgaagactgcttcaattgaagacgacgatgatgatgtgcttgtagtgggtcaaaagggtgaggtatgtttccactggacccttctcatttctaactactttttcgttttcttcattcgaattggcgtgaaagttcagattctgtatgcgttagtgttgtttagctcttaatcatgttcaggatctaacttaagtgatggtagaagcgtattcaatgttgctctagagttctgaagcttgtttatatggttaattttcactttatttgaatggctctacctttaatagactagtcttcttctagtttgtggtacttgagcgatgaagtttgagttctgggattagttacttctgatagttttgatgtgattgccaaattgttatgtgtttgtttcggtaaagggtttaagctgaaagaagatatatgcttgccgtattgtcatatccttctctttgttttgatgtgagctaacaaaaatcgtatttagtcatatgcttgtcgtattgtccaaaacagtcttcttttctctttgttttattgattctttgactgtgtctatgtgattaattcttgtatttggctaataacaggttttattaagcaatctctaacttggccttatttctatgtatagttatttgcagctgatcttttacaaaaaatggacaatgaagacgaatgtacttatggtggtgaaggtgggcaaacatcagcagatacatcacaatctaaaagtttagtaagtgcttctcgttttaaaagaagtagaacatcagatatgtgggattactttacactagaagatgagaataacctcgtgattttcccgccaaaaaaacgtaacctcgtgattttcccgccaaaaaaacatgaccccgtgattttcccgtcacaaaacgtaacctcgtaattttaccgtctaaaaatgtaaactcgtaaaaatttctgaatcaataaatatctcaaatttaataataatgaattaatgatgatgataattatttattattgttttataataataattaattaaattattatttaaatggttaacccatttaacaactcaacccatcaaatgaaatgagttatgggttagacccaactcatttaacaaaatgagttgggtcaacccataactcatttaatcataaactcatttgattatgagttgggttgggttgggttacccattttgacacccctagtaacaacagaatgaattttgtttatagagacaaaaaaacatgaagtaatgaacattaaaaaaaatcttagtaatataatgggttctctaatataatctaaccttcgagtgagaaaaaaatgaacataaaaaaaagaaacaagaacaataaaaagagtgggagacaagagggtgataaatggtatagctacgggacggtgacgtatgatgtgaaagaaaggaagagcgcgggtgatgatggaattaggtgacaggcatgtgaacaacagtgaagctgcaaagcctgatttggttgtttcccttctctttaagcgtgcttccaacgtgtctctttgatcatgaccttcttcttcaaatatacaactcttcacttctattttcatttgctctcattttcacattgattgtgttcttagaattttgttcctcgtgcaatctcctcactagtttaactaaataattatacattgatttttgttgtgagtctacttaaattatggtatctattattgtacatttcataactataccacaccaaaagtagagcatattaagcagccggcaaaacaaagttcaattgctgctttcttgtctctctcgtatcatcactctcctttgctaattgctctcagcccataattataaacgagtagaagaatatttaacactctttttcgtaaattttcattttttaccacttgttaaatgctctgtcttactttttttttatccattgtaattttcattggcggtatgcatatttttagacagacaaaatttaaaccgatacgtggtcccataactattgaaactctgattataatggaaaacatattaaatttataggtattttagaccactcagcctcttaaatattggatggtcccatttctatctaaatcattttaacaacaacaaaagaaaatataccataaaacaatctgatttgattttacttattgctaaaaccatataataattttaataaaatataataaacacacgcatgttatttgtggacctacaaaataaaataaaaagaataacagagacaaaaaaaagtcatttcaaatatataaatcaaattaaaattaataatattttcatgtttttttaagcttccttacaaaacagaaacctgaaaccatgttacctataacaacgacatgtatttattattatttctccattagatctaacgactcagaatcactctcacttactcattctcaaccgtcagatctaactacagtactccacaccacatacgaacaaacctaatctatccttaatacccttacttttgtagtttattactaaatttaccactccttccatgtttttgtttctctcttcttcttgattgttgcgcttttgttagctttctctggttcattttccatggacggaccttgacctctctgcttcccttcgtgcattttctctctctcactatcctctctctttctagtgtttgtttgatcctctgcgtactctgttcttcttctctcttcaggtactagtttcaatttctctaaaaggaactattgaaacctccttctctagtttcaattttcaatctgggtttgtttgtttggttcttgtagcttctttggattcattatcatttgggtttagtttatttttctcgtaagtaagtgatttagttgtgattctgaattttagggaaatgctgaagaagttagagtaagaaatttttggtttttgaatggaaagtgattgattttggggaagatgagttctgggaacgataaggttgaattctggctatgaaacctaggttaaagtttctaactttatcttacttgttaagcaaatctaacccaattctcatctgaaaccctaatttttctgggttcttcttaaaattgagaattttgttcatgcatctatagaaagtgaagatttttatgtaattagattgattttgggttgttcttcttgttgttgtgatgctaagcagataaaacaagtcctgcatattgaagatctgatgtcttatcgattgctaagtgtggataaggatgaactggttacgtcaccttgtttgaaagaacgtaactacttgggtctctctgattgttcctctgttgatagctcaactattcccaatgttgttgggaagagcaatctcaatttcaaagctactgaactgaggctaggtcttcctgagtctcaatctcctgagagagagactgatttcggtttgctgagtccgagaacacccgatgagaagcttctcttcccgttgctaccttctaaagacaatggttctgctactacagggcataagaatgttgtttctggtaacaagagaggatttgctgacacttgggatgagttttcgggtgtgaaaggatctgttagacctggaggaggaatcaacatgatgttgtcgccgaaagttaaggatgtctcgaagagtattcaagaagaaagatctcatgctaagggtggcttgaacaatgcaccagctgccaagtgtgtattatatgatgatttgtttatgagtttgtttatgagtttgtttatgagtcaagaacgaatcttgtggtaatctgtgtctattgttttgcagggcacaggttgttggttggcctccaatcagatcataccggaagaatacaatggcttcttctacttcgaagaacactgatgaggttgatgggaaacctggtcttggtgttctgtttgtgaaggtgagcatggatggtgctccgtatctgagaaaggtcgacttgagaacttacacttcctatcaacagttgtcttctgcacttgagaaaatgttcagctgcttcacccttggtgagaatttactatgtatttaagctaatcattgattctactgtaaaacagaatgaaccaaagaacagtgatttcgattcttgtttgtgatctcaggtcaatgtggtcttcatggtgctcaagggagggaaagaatgagcgagattaaactgaaggatcttcttcatggatcagaatttgtgcttacttatgaagataaagacggtgattggatgcttgttggcgatgttccatgggagtaagcttcttttggaactctcagctttaataactgtggttttgtttccgttcaaaagttgaatccttgttaaaacctatttgcaggatatttactgaaacatgccagaaactgaagatcatgaagggttctgattctattggcttaggtaagttttccaacatctttccccctaatctgaatacaaactcaatggctcatttcattgttgatttattctgtggcagctccaggtgcagtggagaaatcgaagaacaaagagcgggtttgaaacgaagatgctcaagacaaaaaaaaaacactatgcacagttccaatgtttaagttttatttactgatgtgtttgaaaactctttagtctttttactaatttgtgttgtaagactttggattctcttatttgtgtgtgcttgttcaaaacaaatacattcttatgtgtgtgtttctactttgaccttcaagatatttcgtctctacgcaaaatcttgatttgtttattgttagcacttagtaccaaagtctataagtgataattacgataaagaacctttaaccacacaaagtggaatctcaaatgatggttattatctttaaaacatgaaagtgtgtaaatctggataagctttagactaatcgcaatagtgtcttctacaatattcttacagattaaatactagaagaacaaaaaaaaaatgtaactacatatatatattttttttgttttcgatttttttgtaacatacatataataacgtataaagaagactggtgagtaggaagagtagataaataaacctcaccttaccgaaatagagggcatatcaaatacatgtggagcaagagtggatgagatagagagaaaggagaacatttatgtagtgagcaaaatagagtttgacaaatttatagtctcatacttctaatagaggtagatgctaacatagctacccaaacgaaggaaagataataaaagaatgtgacgcataaaaatttgaattttagcaaacttcttttgagaattgtgagctctgttaactcgtatttgtaaattttttttttactaacatctaattttatttatctttgagctccaaatttatccacactattttattttatagtaaagtttcataaactaaaaccaagatttatttttgtatttgcaatttatgtgttttatttttctgatatataaaatacaatacatgtattgctacaaaatatatatagttctcactttatatgaagttaattttttttcttaaatgttagtattcatattctaattccctcttccctacatctaaaagagtattaattttctttagatattcgacatcagctgtcaaattagtcttatcaaatgggactcagtgatttgcacaaatgtagcacttctaaatgagtttgtggttagtgcacttcatcgttgactttattttcaaatttgattgttttgctattcgtaagaacaattatatcagtcacagtcatatgtcttgttaatgcttttctttcatatgaaccactaattctttttttcattgatcaaattaattttagagaagcttatgatatttgactttggtaataataccaatactcaaagagagtagcgaggcctaaacgttaacatattatttattcatttttattttatttttcataattttatatcaaaacattggttataaaatatataaagttataaatgtcatctatttgaatttattatatatattcacacttggtttatatgaaaactagaatagttcagtcctaaaaacattttaacaaaaaaaaactaaattttttgaaaatagttaattcataatttacaattttagtaatcaagtattttttattttatttttgattaatgtttttgacttactgaaaattatgttttgtataaaacaaatcagacacttaagcggctaattttacttaaaattgggcattcgaaggttcatgaactcctaagcgggtgtctagtcgccgcctaaaccgatttattgaacattgaatgctacaatgaaactcaaaaaatcatttttacataaactagacttatatttttgtagcttttattagtagtgttgttgtggatcaccatccaaactaaaaccggtacaatacaagtaataaacaggaaatatatatacttgatttcatattttcatactaacacaaagacatgttactcaaattccactgtagaaaaacttattatcttcttactcaaattctactgctttgttctccgccgttgcacatttatctctacatgagtggacaacgttggatttgtatggttgagttattaggtttattggaggctactttcatagagaaatgagaacaccgatcttctcaatcagtactattgtgaatcaagaatgctagataacgatttcatattagaaagtttaaagggtataaaatactttatggtaactaatagaacaatgatagagaagtttgaggtaccgatagatggttatgcacttaaatttaacaaaatatatataatttggtattaaaattatgtttttgaaagttttggtttataaaaaaatttcgtttgtgatatgtagctatataaatattgtatatataaattaatcgggtggactttccaaatatcacgtaattaactgaaattttattttactatcctgataaataatccatacttttttttccgtcaaaataatacatagttatgacttattatattaaataaataattaatggaccacaacatagaaatctaatcgccttaactaatatataatcatggatcggtccacagacagatcatatggctgtgtctcccaaaacctttcttctacttaagctatgtgtttcagtcaaattattcttattatatacactccaacaaaccactatcttctaatttctaatcctcctttactcattgtactcattcttttaagcatacccattaaaaagaaaacatattttttcttctagtttgttcatttcctccaattaatattcatatgtttaagattgatatatacaattttgtttgaagacagaagaataagatattagatacgaaatgattaactatattatctaaatatttggtttgactatagtctatgtctttttgtctacaattcacatatacatgtttttattcgtatttaaatttgttgctcactatcactacaaactaataattatgatttttatttatttattaaaatttagggatttaaaatattctaaattgtgtgaataatgcattgattctgcaaatggtggaatacgatgactaactaagttattagacatccgataactccatctcatactacatgtatattaagtttttaacaaatataagagaaggaagttattaacaaatataatttttgtaggggtacatatttggtgtggctaaaattcatttaaaaaaaaaatagaatccagctaatttatatccataactttttattaaacaattttcaaatctcattgaaaggtcaacagatagatgacttcattggcaagtcgttcgaaattgtaacttcatcatgtacataactctatatcaaatcctttcactaactcatgctaaaaaatgagattgaataacacatttgatcatctcttcaggttactgaatacatcttaaaaatattctgcaacatttgctatgatttccttacataaaataaaataaaaacatttgctatgactatttaataagtaatagagtattaggagaaatattcccaacactatttttggttattatcaaaacagaataactttgggtgggtctttatataccttaatgacgaaccagctgatcataaaacgaagccttattgaatgaggttcctggccattggtaaagaagttcaaaattttggattagtattggtggcgccattatataaaagtaaaaccgggaaaatattggattatttggttcatctgctaagcacgaattgataatctcctaaggaggaattgagaagtttgtttcaaaatgttaatagagcttcctaaatatcttagactacgcactagcataatgctaagcctgccataaggcaaatgatcaaccttcagagttcagagatatattatgaatctcatcatcgatattcaatagacagacagagttttcatattttacttgagtaattgcattttaactgttgcacctaagtatgattattcacacaaaatttaaagcgtcgagcacaacaatgcaataatttactacctccacaaatactttgcttgcatgaaatatgacaataaaacgtttggtatttttaaaacgcaagaaaccatactagcataatagtagtcaaagtgtgattagtctatgaaagtagcttaagactacaccaataatatgtgtctggtcctataacatactacaaaatagccaaacacgtaggtatgcatgcaaatgtacgttaaaagctgtaacaaaaacagacaaacaaacaaaaaaaaaagtttggcgaaaaaaggtgataggtatcaataactagttgagatgggatagagataaattttaaaaaatggaccgacctattacaaacaatttaataaaagtaacacaagagtacagagactaaaacagtagctatggttttcttttggcgtctctgtaataaattggtttctggggatcttcgtcctatctcccatgccattcactatcaatacatttattgatgccttcattatcatctttcttttgtttttttgccgatcactttatttttttaactcgtaccatattctatagcattgatcctcttgtagtcgtaggtcgacttttgtttttatttgatagtaacacttatgtccttggtgatatgtatttttcagaaatgctttttcgatttatttaaatgtgtacccttttgtcgaccaaaaaaacaaatgtgtaccctatctttagtgtttactttgtagtttgtacaaaaatacgtttttatgttcgagcaagtttacttttgacaaagaaatgttattataataataataataatatattgaaatatcaaaattttgtgtgtaaatttatttaattatttgaaaatttcaaaaatttccaaaacaatacgagtagctttgcttaaatatatctaaaaatacacaaaataactaaaatatccaaaaaaatcctaatattttctatatataagtataaatataactaatatatacttatatttgagatatgttcgaattttttggattttaaagtttagaaccgttcgggtattttaaaagtttggtttcgagtttggatcggatttttcggatcgggttttttggatcgggttcgggtattatgcactggcctagataaaagaaagaaaccattcatcacctataacatttttactgcatccaccgttattatcagtatacgaacattacctcagtttcagcattatagcttagcaataaatagctgaagaaatgtagttggtattattgttatagcttagctagtggtggcaacatgtttattttctattcaccaggtgatgatggcttatcggatcaagtcttgattcgaacattaaatgttttacatggatcgatatataaacaagttaaaattggctcacatccatagatcgatcccataatctatgcgtttatacattcactgcactgtattaatttaacccaatcatatttgctcatctactacattaaattctgtcaaagtttcaatagtgtgttacacaataacggtcaaacaacaaatgattctccaataacaactatttagacagtcaaaaattttagcgtgagactagacggatcgatagggcataatagcatatatgtatagcccatacattaataactagacattattacaaaaatttcggtgctaaacaagtttttttttaatggacccttttattagattactttaaataaaccgatgttaaaaatcttgtttacaaaagtaataaaatgcggttggatatgaacatttcgtgctaaataatctgttttaacattttaacttcaaaaaaataaaaataaatataaaaatcaaacacatccttgtcttcatgaatcgcctctaaatacgtagcaaagattggtcactttgttggaaaagacaccacttttatcaagtctgaggaatctgtaaagaacgttacttcttgtttgtcttgaccaatcatacatcttattgttcatacgagtgaacgagtgcttccacttatgtaaatagacatgtgagacttcttcgtaggttgacatcacctatagttggatattttcttgttggtaagtttttagatagccaaaatactattaaacattcataagcaagtgaaaatatttatttgaacgatttaactaaaatgttgttatgtatttatacaaacatatatatttttttatacatatacatgttattttactaaataacgtttttgtccaaagttttttttactgaataacgtgtaatcaaataaaataataaaagaacaagggatctcttcttgataaaatattttgatttcatataaaagtaggtgatatctataaaataaatttacaaaatgttttagtttgtgaatgaacttcagagtaaaattgtaaagttaaaagtaattttacaaatttaaataattagtttagttatttagcagatacatatagtcagtctgctatcatagcatttaggttgaagcctttaagtttatcttgttcaattttttatataatatatatatatatatttttaatctaggtggtaaacaagctttatcacttaaaaggttaaaatgagtggggcaataatagatgtagctcataagttctatgttgaaaaagattaataccaaaaatcaatcattttcttataatcaaccatggagtagaaaagcaattacacaaatagagtaacttctaaaatatttacagctttttaggtagtcaattactattagtactatttcttaattctctcaataaaataaaataataaaaaatcatatagataatcccaatatccccaatcttccactataattgaacaaaaaagactcctttttaaattcaacctctcccaccttctctctgcaactctctcattttcttaaaatctctttctcacagaaccaaaaaccaaaatctcagtctcaaacaaacaacaacaacacacgagtcacgaggttgaagaagaagaagaagaagcaaatatgttaaacggctggagaagagctttttgcacttccattcccaaagaaactaaccaaaacgacgtcgacgacgacggactcgttggtctccgccacaaatcaacctctcgattcggctttttctcaactccttctacgcctcgttctgattccggcaccggaacttacagcctccgttgcaggacttcaacagccaccgccgtctccactacttcatctcttcccggaactccaaagcttaagtgcaaaaccaccaccaccggagaaacaactcccagaaacagaagccttgtctctcttttaacaccttcttcttcttctatttctccggcgagcttcactctcctcaaatccaaactccgattcaagcagagtagcagtaacaaatgtggaatctgtttacagagtgtgaaatcaggtcaaggtacggcgattttcacggcggagtgttctcacacgtttcattttccttgcgtaacctcacgcgccgccgcgaatcataaccgtcttgcttcttgtccggtttgcggatcctcgcttttgcctgagattcgaaattacgctaaaccggaatctcaaatcaaaccggaaattaaaaacaagtcgttgagagtttacaacgatgacgaagctttgatttcatctccgatatctcccgccggatttcacacaatacttgaatcagatgagaacgaagactgcgaggagtttacaggattttccgttaatactccgtcacctttaacggcgaaattgttaacggatcgaaacgtggacgttaagctctctccggaatcggctatcgttgcgtcgggtaaaggctacgagacttactccgtcgtcatgaaggtgaaatcgccaccgtttccgacggcgcgtggatttgcgcgtagagtgccggtggatttggttgctgttttagacgtaagcgggagaaattccggtgggaaattggagatgttgaaacaaacgatgaggattgtgctttcgaatctccgggagatggatcgtttatcgattattgcgttttcgtccagctcgaaacggttatcgccgttacggaggatgacggcgaacgggaggagatcggcgcgaagaatcgtagatatcatcaccgttcctggttctgtctccggcgtcggaattgatttctccggtgaagggatgagtgtgaacgacgcgttgaagaaagcggttaaggtgttagacgatcgccggcagaaaaaccctttcaccgccgtgttcgttttaacggaccgtcaagcccatcaagtggcccaattagcccattcgagaatccctatacacaccatatggcttagccacgcgattcccgaagacgcgtttgcgaggaccatcaacggttatttgagtttgtcggttcaggatctcggtttacagctcgggatagtttccgggttgggtcaaggagagataacttctgtttactctctttccggtcgacccgcttggcttggaaccggttcaatccggttaggtgatatgtatgcggaggaagaaagagcgttgctggttgaaatcaaatcaccggttaacaattccttaaccggtagtagatctcacaaaatcatgaccgttagatctcgttacgtggatccaacaactcaggaattaagaaaccccgaagatcgcgcgcttttaatacctactcctctaactgtccgatcatcatcaaatcccaacatctcacggctcagaaacctccacgtcagcactcgagccgtcgcggagtctcggcggctaatagagcgtaaccattactccggagctcatagattgctgacgtcagctagagcattgcttgtgcagcacggtttgagctcgagcgatgcgtgtatacgtggactggacgcagagatagctgatcttaatagtgtgaaaggaagacacgtggcggcatcagagagtttggagtcgcttactccgacgtcggcttggaaagcggcggagaggttggctaaagtggcgatggtgaggaaacatatgaacagagtcagtgacttgcatggtttcgaaaacgctagattttagcttttttatgtatttaaatatatttccatatttagagtaacaacttgtgtaataataatctgatacaaacaaatagaaatggtgcataaatggagttatatttggtcaaatgataagtttggatagttattttatatcattcagcttttatgcgatttcatttctcaccgtaaagttgattatacaattttggttagggaattaggtagtaggttttaccaaatcaatcttaatatttaaaattgtataaagaacaaactatatattaagccactatcatatacactcaatactaaaatcttacacgcttagagaaactcgtgtaaaatgtcaatgtaaaatgaattttagcaaaaaagaaagaaaaagaaatcaatgtaaaatgaattggccggtgatatttgactgaaaacatgactagagctcttccatttgttttgttgtaaaatttatacgcattcgaaatgcttataacatacattagtcgtgttgaacatggtatgatcttttcttttacttaattaatctcttatgagaactttttatatatatatttttgtgctttacaattattatagtgaaactttttagatagagcctatattctatgtgtacttcttcgtaatggatgtgtagattataaatactaaaatgtagtcaaaaacaagggatgtagccttttcgcggctacacactgattaaattcgttgtatccaatgatggtcaacaaaatattttctaagcaatacaataaatcagcaataaacaattctaaagaagccttataaatatgattgcaaatgctaataattgagtttaggatatcattttaacggcggaattctgtctcctttttgtttgtctcgtaggctttttacacctctcttatcattttaacgccggaattcatagtactatgaatctatgattgctaatgagtaatgccacatctcttttgggagtcgcttgcgttacgcacaaaatgcatcatattttcccaattgtctagcaattagccgcaaaagatcaatgtttacacaagattcagtaggtatctcgattgatcggtcattatctatagttttatccgaaattaactaaagaaacttatcaacttcttagataaattaatggttgtagaaaccccttgacttagtagttgattttgtgaacttttaagacaagatgcgagatatgaatcatatgatttacgcataattcatatatattttttacattatggatacaaaaagtttaaagttgttgtagatagatctgtcgttggatggtctcgtgtattccaaaccggttaaatttatctaaatgtaagtttatcttagaaattttgattagtcaattagtcacatgtctatctcaaccagcttcttgaactactcgaaaataaattgctaaaagatatcacttttgttaaaaatacaaaacttatatataagcatcggcctaagtgttatatataagcatcggcctaagtgttacatactttcattttattagcccgactaacgtataccaccaacttttaaaagttttgaataaattcttgtaactttagtcaaacagagagaaagagaataaaagccaaaaacaactttgaaagcaaatgtttttggtacgtttaatttggaaagcgatggtgcgttccactaaagagatgcaataatggttcgcacgactatatctaaaagttcatatcatatctaaacaagttcaagatttagtatatacatggacacgtattaatttatgtagaccaaaagccaaaaagtagttcacaaatttatgttagtggagagaggagagttttgaaatgatcaagaagacaaaatgaccctaaatacttatctttaatttaataactcttttataatgtactttatccattaagaatctcaaaaagctctccaaacataaagagtttgatccttggggttgtattgtattaagtgaatgatataccaaattttaaagtgttttcttttcgaagcaccaaagtttaacgtttccattttcgtatagataaagatattcgacaatcaatacttaaaaaatgaaacattggtgagtgaacgacgaatgatggtcgtatgatgaatcggtaagttctgtcttggcaagtgatcaaagttggcgcgataacggatcttcctgtcattcaaaattcaagaccactagaccaaagaccatatgggtataaaaggttttatttcaaactatagtttttgtacacgaacccaattcaagttcataaaagaaaagataagaaacatttgtctactttctttagaaatgctgcataagaagttgtaaagctagtctaaaaatataactgcttacactgcgaagcatcaatatctgttggacaataaggacacttgaacgaccttgaaccattcctcgacattctgttgatagactgcttgcaaaggacatgaccgcaagccaatctcatcggcggattatcttcgctcgagtgttctttagagacagggcagacaaagaccgagtagaagcgatactcttcagagagttccacaggtacaagaagttgctccattgtttgccactcttttcttttctccggcagcacgttcaaatacttcaaaaacgtcggtaaaacttgtgaacctgctgcaactgttacacttaaaggactctctggtgattcaccgagtaggatgcagtattgtcgggttagttccttggcagcgttggtccacaatacaggtgagaggaactctgagtatggggatttattgaggtttctgatccataagagagagcacatgagtttctgtatctcagggaaacagcagctatctgctgaatacgtagcaaagtgttttctcgcgtagttgatagcttcttcggaggttttgtctttagctatctccaaaaagtgaaggctgtgaagtttcaactcaagatctgactttgcttcctttagcttgtcagagtttgaagctacccatttcaaagctggtccgagatcccgttctttcatggcttcaagtatcatattcatttccatgaaagctttagtaacagaagattcaggcttaacctcaccagtctcggaaatgaaacagtcaccaacgtcgtacatgccttgcctgtagaaaaactgagctagtatctgatgaactgtatgagtatcaaacttaacgtttctgtaagccgtcgatatatctggattcagagttttgtcaagagctttcgggtatttggtaagaaccccatttatttctttctgagacgcttctagtagattgattggagcaatctcctcaaaagttttcttcagatcagcaacaacagattcatgattatcctcctgtatcgttttcaatgccttgtcgatttcttgagacattttgtctaccacttcatgcgttttgctatagcatagtttctgctttttggtaacacgatcaaacgcatctttgacattctttagctccattctaaagataatcaactacatgaaagaaggaaccaagtatcaataaccaaaagaatcatatccacaataaccactataatctccattaatcaactcattgttcagaggagttcttaaatctaatcgattcattgcaattcaaattctcatagcatagtagcagaatcaacgcatcagatgcaacaccaaacattttttctgattattcataccaaatgatccaggaatcgaaatatcagacacacggattcgaatttcaaacaaaccagagaatctgacgatcgcgaatcagaaatgaagcgaagaagaattcatattaagaaaccgtggagagtcagagatacataaaaggcatcaaagaatctggaaaaacatgaacctgaagaagcgatgaagattatcgccggaaacggagaaagatggaatcggaggaagaagagaagatgaatttgcagatttcttcttcagtttctttgaaataatcaatctctctgatcttgaagatgaatgaatcacagccgttggatttgatcggtttcttttcaacaatgtaactatttgggccgagaatatttttacgtgggcctagttaattaaaattaaatgcgacagtttgaggtgtcctctccaagttaacgaaatgtatatatgaagaagctaggtctctcggctctcgctaggggtttctaggtttataacgtatcaacaaacaaggattcattatctccgactcccaaatcaaatgatctcatcatggagatattgtcgagattacctttaaagtcattagcgaggtttcattgtgtgtcgaagctatgggcatcaatgtttggtagtccatatttcaagaacttgttcttgaccaggtcatcggctaagccgcgcctcttattcgccttagttgagaaaggcgacgttaaagaagaatcatgtggtgtgtggagctttttctcgtcgcttcagcttgataatttatatgaggaatcgtcgtccactcttgtagcagctgccgaatttcatgggaaattctctccaaacaatcattatgttaacctaaaaaaaagtcacgtggctacgcctctggtttagtctatttccatggtagttaataccagggtggacttctgatatgtaaccccatcacaagacatcatgcaattttaccgaagctctatagttatagactggcatatagctttttcggatttgaaggggacgtgggatgtttgatgttttaaacccgttttgtgtaggtaacaaaactagcatcacaagattataccaacttgaccaaaggtctgtttagtgattttgtaatggacgttaggccatctccaacgctgggctctgttgaaattttgcagagtctctgttgattattttgattaaaatttaatcaaactgaaagaaaaactagagaagcgtttctgtggagagagtttatgagggaatgagagaggcgaacatgtggcatacattcattggttatcttctttaaacaaaagaaaaaaataaaaatgattgatttcattttctttgttttgcccgaacaaattcttttctctctctccttctctttctcttcgcgacattgacaaaagaaaaattgctcaatctttgaaaaaccagaataattgacgccggtgattgtttgtatttcgctgtgttatcttaggctttcaacggtgttcacatcggcggaagtttgctgaaatcgaaaaatagcaaattggattcggagagttatcgccgacgccttccccaatttaggtatgaatcaattctagtctttattacgtgattagatgttgtatttggtggtttaatcaaaaaaattagggtttttgaattgaagaaaatttagggttctttttttaaaattagggttcttcgtttgtagcaagattagggtgttttttgatatatcttgaagcattttctatagttttgtatggtcatagatcgttttggagacatgttgtatagatttatatggtcatagatcgttcgatagtttgattttctttttaatgtatatgtagatgtgattgattgggtttagtaaatgtaaactttgttgtttaatatctgtttatgtgattgaatcaaattgtaaagttaactgtaaatgctaattgttgtttttttctctatgcttttggtgagtgtcaatggcggatgagcaagtggttgtgagttaaggagaaactgtaaaggaattcgtctatgcacttcaatgaaggtaaatatgtacttgattgattgttatatagcattgattgttattttttttgtggatagacgttacatagcttttcactgtgataaatggtttttgacaaatgataaagcttttgatagtgataaatgtgagctttagacaatgataaatgtttgcttgaagttgatttcaactaataaccataataatggcttgaagttgattacgactaataaccataacttttgcttttaaaaatctttttgccttaactgaaattattaatgtcgaagcagtttatatataacccaaacatccaaagctactaacttaaaccattctattccttaaacacatagcttctcagttaacttttctcttctttaaacacatagctacccttctttctactctaaacatccaaagcaacttgtaaatggattcttacaatccattttctcaagcttcccgttttatggacttgttgcaacagtcaacaagaaagccacaacaatgagaccaatcaatatgaggttggatcctcagaaattcccgtttttggaactcaacgttgtcaagaaagtcatgagaaacgttatgcttctagggtggccattgcaagaaagaaatgggcagctaaagaggatatagtactcattagtgcctggttaaacactagcaaagaccccgtggtcggaaatgagcaaaaagctccagctttttggaagaggattgcttcttatgttgcagcaagtccagaccttgatggtgttccaaagagagcgtcggctcaatgtaagcaaagatgggcgaagatgaatgagctagtcatgaagtttgtgggctgttatgccacaaccacaaaccaaaaagcaagtgggcaaaccgagaatgatgtcatgctctttgcaaatgagctctttaaaaatgatatgaaaaagaagttcagtctagatcatgcatggaggctgctgcgacatgaccaaaagtggttaatatctaatgctcctaaagggaaaggaattgcgaaaagaaggaaggttcgagttggtactcaagctgcaagttcacagcctattgatcttgaagatgatgatgtaatgcgtcggcctccgggtgtgaaggctgcgaaagcaaaagctaagatgacaccaacagttaaaggagaagaagtgaattcagttgaacacttgacttctttgtgggatcttaaggaaaaagattgggatcgtaaggataagcaaagcaaaaaccaaatgcttgaaagtcttctttcaagaaccgaacctctttcagagtgtgacttggttcttaagaagaagctaattgaggagttgttttcataagtaccgaacctctttcaaatgtttaatttctttctaagtacttctaggatttgtttcaatgtcacaacaatgacatgtttaatttgctttgtctgtttttattgcaaatcactttgcttatgtatgatattgtcttaatgttatgtatgatattgctttaatgctttttatgatattgttttgtctcttatcttatgtcacaagtcatatttggccttatatgtcacaagactttgttgttaacttttgcagtttatcatcacgggttggagacaaagatagacaagacacgtaacttgcaactcatgttccacttgatgccaaaagagacatatgatttgtttgctttgttgtcttgtttttagctttgagtctatcaacaatttaaatatgaggtacttttagactaaatatatttaattaaggtatttttattccaataaaaaatattaggtattaaacaacaaaaaataatagatgattttttcaggatttttttgccaaattattttttagtttattatataaaaatattatgctttatttaacatatataaaagataaataatagaatatttattatattatttagtaatcacaaatgatttaaaaatgctaagactgcaaaactactattttttacggtaaaaatgtcatttaatcccccaactttcaaaaaattggccattttatacatcaacttcgtatgtggctgtttaaaacatgaactaaacgttgactaatttttaaaacatgatctttcattgatcaggccaaaatagacatgccgttatcagtcattaacggaacttctaacgtccgttatcatccgttaactttattagtcaagtttcaaattgtggccattttaaacatcaacttcttatgtggccatttaaaacatgaactaaacgttgactaccatttaagacatgaaaaattcgtttacagggccaaaatagacatgtctttatcagtagaacctagaaacccgttaatgactgttaatctgtccaaaacaacgtcgtttgaaaataatcgaaagaacataaagatttttcccatatgaaattccatattaaaaagttttaagcagaacccaagaacatagtttgataaagcgataatcgcagtgccagtaattggaaacaaataaaggtgttttcgtttatatatttgttttaaattttaaaaggaatcatggaagcaaattgaagactcattataagattgttcgtcttgtttgggcggttgtagaaatagatttggggaactagggtttcatttagaaaacaatcctgattttcttttgattattctcaaaacaaagtcgttttaggaatactaatagactcgttaacaagtgataatgaatgttataagtttttttaatgaatgatgacaacatgtttattttggcttggtcaacgaatttctcatgttttaaatggtagtcaacgcttagttcatgtttaaaatggccacatataaagtcgatgtttaaaatgaccacaatttaaaacttgactaataaagtcgttaacggatgataacggacgttagaagttccgttaatgactgataacggcatgtctattttggtatggtcaacgaataatcatgttttaaaagttagtcaacgtttagttcatgttttaaacgaccacatacgaagttgatgtataaaatgaccattttttgaaagttgggggattaattgacatttttccctattttttaccaccttttgcaacaataaccttttatgttgtacatttttaaaaataccccttccctttaacagaatgaccaaattactctcatctaataggaacatgtaattggaaactgaaattttctagccaaatttatttttcccgcaaaaaaaaaaaattccgccaaatttttttcccgccaaaaaaattcccataacaattttttttttcagccaaaaaaatgcttttaaaaatccttgtgaaatatttttagcggaaaatagatttacaaaggattttaaaagagttttaaaagatttactagggatttaaaagagttttaaaatatctacaagggattttaaaaagattttaaaagatttacaagaaattttaaaaatttttaaaaagatttacaatcgaaccgacccgaacctgattggacccgaaccgagattttctatttattctattgaatcctagaataatatacccgatatacccgtacccgaccgggtattacccaaacccgacctgcatacctgaatgtcctgccctactacaaattttgatatacagtattgctaaaactttatcatcgttttgttattaatatgacgcggttaaaaaaatatgagaagtctacaaatttttagacgtagatgagataataaaaaggaaatataacttttctctattattggtatttagtttttataaacaaaatgtttacaaaaaagaataatattttttttgtaataataaactctgtaaattgtgtacttttgtgatatataagcttcaactttctatatactttttaatctttgtttttttttttaatttaaaatctttatataagcaaatataatttatattccactccgtttaaagcaccatcgatgaaaattcccggtggattctcgccggtaggaggagatgtctcaattttcactcaaatcttttttagtttttaccaaaaatatattaaagtaaaaggcaaaaaatcttcaaatttattcttaccaaccaaacaaacaaaaagaatccttgcaaaataatcataaattttaaatattttcccatttaaagagatatgcaagtgagaacttttgagaggcgcaacaacaagatggcgcataatagcaaaagacctaattttgcttctgggtccttggattttcttcctcttcctctttattcccctcaaaacctaggagcccaacgagagcacccctttcctcttcttctatatccctttttatctcttcgcagctttctctcctctctcagatctatactctcttctccttcacaatcgttcgttttatcctctccatcggattcgtcagatatcttcgatttctcgtcgtttcatcggttccaggtcaaatccaggtatgtcaattgtaaaatttcgatcagattcgtcgatttcgatcagctttttcgattttggatctattttctatgaaatatcagatctggtgattgttttacatatttttgggttgaattcacaagattttctggaaacgagatcgattaattgagttttctgtgtttttatcttaagctagatctcgatttctatgtttttggattgatttgataagattttcgagaattttttgtgtttttgtcaaagttcgatctcgatttctatatttttggttgaattcacaagactttctggaaacgagatcgattttgtgagttttctttgtttttaatctcgatttttggattgatttgagaagattttctgaaagcgagatcgatgtttttggggattttctttgttttgttcaataattcggtctctgttttcttatcaaaaaattcgttttccatctcaaatcgatgttcttattgatttaattgagttttagtttgcagggatttgatcgttggtaagctatctttcagcaaacatgcatggttatgaagatgtaagcacgctcatgaatttttgttttcagtgattttgtcgaattcaatttaaggtagatagatttgacattgttcgataatgttatattgcaggaccttgatgaggaagctgggtatgatgactattacagcggtgatgaggatgagtatgaagatgaggaagaggaggatgaagaacctcctaaggaagaattggaatttcttgagtcacgccaaaagttgaaggaatcaattcggaagaaaatgggaaatggaagtgctaatgctcaatcttcacaagagagaagaagaaaacttccttataacgagtatgtggtggctaaatcacattttctaattcattacaatgtcctggaatgtgttttgatgctgagcttattgatttttcttaatgcagctttggttctttctttggtccttcacggcctgttatttcctcaagggttatacaagaaagcaaatccttgcttgaaaacgagctacgtaaaatgtcgaattcgagccaaactgtatgtgcatttgatctttgttactctttgtatttttatcatttaagatgtttttgctgatggaattgttttttggggtgcagaagaaaagaccagttccgacgaatggttcaggctctaagaatgtgtcacaagagaagcgacctaaagttgtgaatgaggtgagaaggaaagttgagactcttaaggatacaagagactattcgtttttgttttccgatgacgcggagcttcctgttccgaagaaggaatctctttcacgaagtggctcttttcctaattctggtatgttgtgtcttttgaaaaatctttttcgctatttgtgatctttaagcataccattttcatgaagataacttatacaggttttttgctgatgttcaagaggctcgatctgctcaattatcatcgaggcccaaacaatcatcaggtatcaatggtagaactgctcacagtccccatcgtgaggagaagagacctgtttcagcgaatggacattcaagaccgtcttcctcgggcagtcaaatgaatcattcaagaccgtcttcctctggcagtaaaatgaatcattcaagaccggctacctcgggcagccaaatgccaaattcaagaccagcttcctctggcagccaaatgcagtcgagagctgtctcaggctcagggcgacctgcttcctcaggcagccagatgcaaaattcaagaccacaaaattcaagaccagcttccgctggtagccaaatgcagcaaaggcctgcgtcctcaggcagccaaaggcctgcgtcctcaggcagccaaaggcctgcgtcctcaggcagccaaaggccaggttcgtcgacaaaccgtcaagcacctatgaggccaccaggttcaggttccacaatgaatggtcaatcagccaaccggaatggccaactgaattccagatcagattcccgaagatcagctcctgctaaagtgccagtggatcataggaaacagatgagcagtagcaatggagttggtcctggtcggtcagcgaccaatgcaagacctttaccttctaagagttcattggaaagaaaaccctcaatctcggcgggaaagagttctcttcaaagccctcagagaccgtcctcatcaagaccaatgtcatctgatcctaggcaacgggtagtagaacagagaaaggtttctcgtgacatggccacaccccgaatgatacctaaacaatcagcgcctacctcgaaacaccaggtatcatgatcatgatctttcacatctctttcttttgtccttcctctagccaaggcactaatttgtcaagtaatatttacagatgatgagtaaaccagcgctcaagagacctccctcgcgtgacatagatcatgaaaggaggctgttgaagaagaagaagcctgcaaggtcagaggatcaagaagcattcgatatgcttagacagttattgtaagtattgctccaaactttcttcctactctcaaattgtaagttacaattttctaattctattttgtctcctgatacttaaatgggggtttgtgtatcaattttagaccacccaagcggttttctcggtatgacgatgatgacataaacatggaagcaggctttgaagatatccaaaaggaagagagacgaaggtacatgagtatttttgttatcacacgtttcatttatttgtgtttcttggatattccttaacgattgaattggttgttaaatgcagtgcgagaatcgcaagggaggaagatgaaagagaacttaagctcttagaggaagaagaaaggagagaaagactgaaaaagaatcggaagctgagccgttagaagaatcctttctcctttgtgtctttgtcttcttttaggacttttttagtgttttctcattgaaatctctttggccgcttgaggcaaaaaagagtttgaccttttttttgttttgtgttttcaaattaaggatcttttttttgttcatggaaattgtacaattagaaataatatcttttattggggacacttcaagaagaatctgttggaaaccttcccagttagtgaaagcttgattctcttttttttttttggagtaaagctaaaaccagaggaggatgataaagaaaaagaaacaaagaatatttctttattcacgtgtagagttcctttagctgataaaatttcactttttatgagtctgataacatgattttagtgattctttgtctcttttattctttggctaaacaaattcgttgagaaatcaaatggtgaccaaagaagaagattgccttcctcctgtaacggagaccacgtcgagatgttattctacttcttcttctactccccttgcggagttagagactgtccgaagcttagaaatcgtcgaatcttcttcctctctctctcccgtttggtatattgttttctttacttactctttcaattttctctgtttgtttgccattgaattctttcttttactcacaatccgaggaaaaacgatgcaaaatggaaaatttgggataccgaaaacaggaatctgatttatttgtgttctgtttaagactctttttatctctttgcattgaattctgtatgttcaagatacttagttttagtttctataaagagtttctatcacatgcatcattaccttcttaaatatgtttttccaggttactggtgatcttttgtatcattaacttgttaaactacatggatcgtggtgcgatagcgagcaatggtgtcaatggcagtaccaggagttgtaatgataagggcaaatgcactcttgcaactggaattcagtaagatattttgatgcaatgtagaatcaagatgataattcaatatttgaattttatttatacttttatatcataatgtttttcgtatttcagtctggagtattgttctgttttacttaaaaatgggctttttttaggggacattttaacctaagtaatttcgaagatggtgtattgtcatcttcatttatggttggacttcttattgcatcaccaatctttgcttcattggcaaaaaggtgatcagaaagaactttcatttttgttatttttctctcttctgattgatgtctaaaaaacttattaaagtggtttcgtttgtgtttagtgcagcttcaatccatttagacttattggagtaggtttaactgtttggactattgcagttcttggctgtggcagttcctttgccttttggtttatcgtcttatgtcgtatgtaagttgtttagtaaaccttatgattgattttgttttgttttcgccatatgcgaacttttgtcattggatgcaaatactcttattattactcctaggttcgttggtgtaggtgaagcttctttcattagtcttgcagctccatttatagatgacaatgctcctcaagaacaggtctctgtttgaattttgttttgaacttcttatgaagccaaaacgcaccattatatttataaagcttgtttggtttttacagaaagctgcatggcttggactgttttacatgtgtataccaagtggtgttgctcttggttatgtctatggcggatacgtaagttatatttaatatcaaaacacttttaaaaatacgaaaaacgcaatcggtgattccttcttgatgcgtttaggtaggaaaacattttagttggcggtatgcgttttggggtgaagctgttttaatggctccatttgctgttcttggttttttaatgaaacctttacagttaaaaggttaagacaaatcttgtattatgttatatattaagcatgaactgttacagatatttgatcagagaaacatagtaaacagggtttccttctagtgattcgataaagacggttagatcaattgaagtaatgtctccatcagtaggtgatttttttagtccctcttctatggtaatgttaatgtgatctgattatacacttgtgtagtgacactttccttttgcaggatcagagacattgaaaaacaacaatcgtcttcaggttgataatgagattgagcatgaccagtttgaggtctcaattgaaactagcaagtgagtagatttcatggtatctttgtttttttcatcttccatatacttatatatacttcaactgtggtaggtcaagttatgcgaacgcggttttcaaatcatttactggctttgcaaaagacatgaaagttctgtataaagaaaaggtctttgttgttaatgtcttaggtaatgttttcctcttaccactttttctattcttctgcttacactatgtatcttttttaattgatgatacttgcacttgcctttaaacaggttatgtatcatacaatttcgttataggagcatactcatattggggaccaaaggctggttataacatttataaaatggtaaaacagtcattcatcaaaaattcaaaactctttctcttgggggttccatgaaagattcaagaaactgtgtttgttgacagaaaaacgcagatatgatctttggggcagtaactatcatttgtgggatcgttggaacattatcaggaggctttatacttgatcgtgttactgctacaattccaaatgcttttaaggtaaaaaagagcttttcttctagtatttcggattactcaggtttttatctttaatcttggattcagctcttatccggagcaacatttctcggggcggtattttgcttcactgcatttaccctgaagagtttatacggtttcatcgctctctttgctttaggagagcttcttgtgtttgctacacaggtaaagagtaaaaaatggtttaaacattgaggagtcttgtattgttgttgtaatgtaaattgcttattcaagaacagcttgtgtttcttccttcaggctcctgtaaactatgtgtgtttgcattgtgtgaaaccaagtttacgaccattatcaatggctatatccaccgtcgcaattcacatattcggcgatgttccttcttcgcctcttgtcggtatcgttcaggtaaaatatcccttcctaacatctccaatcctggaaagagaaaatagaaccttcgaaaccaaaatgctacattgtttacacgcaggatcatatcaacagttggagaaaaaccacactgattcttacatcgattctgttcttagctgctgcaatatggtttataggtaaaataaatctcaattctttttattcaaatgatgaaagctttctggtccaaatcaagctttttgttgcgaatttgtgcttttgcaagggatattcataaacagtgtagatcggtttaatcaagaagaaactggaagtgagaacccgaggaggccagagctatcgtctcgaactccataaatactttagtaatctatttgtattgaaattttaacagagtcttgtacagttccaaaacacagtttaacgttttgaaaacatgattccgctatcttctaccatacaaaacattcatcaagttcattatattcattagacaatacaaatgaaaacaagaaagaatcataatgacacagagataaaagttggaggcgaatcatctatcaatagagcctacgcctacatacggcagcaccacaaaagcaaggtttctgcttgatattacccttagagtcacgtacctgatcgagcgcgtaattgtagtcgtaacagagttcttgaagcggaggtatattgtcctgtgcgaagaacatcacgtgagggattctagagtcttcatgatcatacaaaacgttttgggcgtacagatttggcgagcagctatggtttatgaacctcccaacattacccttacttgctgcatcaatggtgaatccactcgactcatcaccttctgccatagatcggcctgcctgtgtccccagcattagctctgacatcccttgagctaaagagttatcatatctgttaccaatatcaaagagatactcgtcgttcccgattcttctttctgcttcactatcctctaaaagttcaccaacgtattcacatatgaagctaccaatagggatcgacttaagacatctcactccccaacctcttgacttggttttgaagatctcaagcggtaacttgatcccatgctgtgtgactcttaggtagcaactagaagggcatttgcagagtgggccacattcatagatagtaggttttgcaccaacaatggctccatcgaagttgtacggtatctctccaccgtttttctccacacaagcgcacaccctcgcttcagcttcggtgcagcgcgtggtgcaacagcatgactttggaggaactggtctgcaccaatctgggtaaatcagtttaacagtgtaggtgaacaaaggcggtttctcgtcgtctatttcgttcacagcgctaatgggtgactgctctttcccttctgagatgtcaagcttgcatagaccttcccggtattttgacttagatttcttcacctctacccaagaaagttcaggttgtccaggtatgcgcctaagttgaaacttgaagacattcataccgtgagatccgacttgttgccaatacttttccacaagatataatccgtcgtaaacataatttccaccttttgatttatcatgagttgacttatgtttgcctctaatgacacgcacaggggtttgtttttctatgctggttgctaacgcgaggtttccggtaataagcttttggtcttcaggctctttcagttcctctcccttcttctttacttgcatcacgtttccgccttgaccagtgtaggtcaagacatccgagttatccagatggtcgtcataccctccagaggctacaatacttgtcgcaactttggccttaccatatttcatataatcgataccggcctggcttggtttatgtataccaagaatgttcagctccatcctatattggaactcatcaccaacctcaaccccaggcacttctcccaaaatatgcacaccagagttgagaaatttgccattccttttgagaatggtcgaagcctcaaaatctattctaagacctttaccttttctcctttggtcctcaggctttgcttcatcctcctgcagaatctttctgcaaacgccatggaaaagacgtagagtttcctttactttgttccgactactatcaccgctgcttgaaccgctgcttgtcccaacacctagtatccgaagctgctcaggagaatccagactttccctatcacgccaatataaattcttcttactcttcttcttcctagatccttcaccaaactctcggctaacaaccttcaaggatgaatgacatgcaattcctttctttgccttctttctacccgcaacaagcctcggttttgcaactgcaacatctgacatttcaatttctagcggctgagtttgatccaaattatccattcctagactgctctcatctgcgtaaacaacgatatccctgacaatgttttcagttccgctgctgctgctaacaccagaacccgccacaatctgttcactgtttgaacactcgtctcccgcggtaacagacaagtctcttaccacatcacctcctggcaaacaaattctcagaggctgaacctccaccggctcagccattctgatatcactcacgttttcagaggcatctctctgccccaaactctcctcctctttaaccaaagactcaacaaccttaacatcttcaacaacattcccattctcacaagcaatcttcacttccattgctctcgaaccacaacccggtggaaagtccctcacagcaaaaaccttccgacgcttaaacttaagcccactcattcgatcaagcttgcaaacaccaccattctccaaaactgacactcctcgtttctccacctcaccattgctctgagacttaacctttgatatctccgtatgtaccatcaaattctccataactcccatttccattcacaatctatcaacaaacaacaaaacatcatcactataaacagattgttaaaccacaaatgttcaataatacgaaactgtttcatccatttttttttctttctcaaatctaatttcagaattcgatttcgcagaaacaaaaacttaatcaaagacgatatctacgaagaaacgaagattaaatacacaacggaaccgagattaaccgatcagattaaaggatagagaaatcaaccggtgaaagatcttcgtctgcgatcgaaaaatggtggagaagaagatgaaggaatcgaatttggtagtaatcggaaatttgagatttcgccaaagttataaatatagtcgaattttttcgaatcaagtgaaatttgggtaattaagagccaatgaaccataaaaagggaaataaaaatcagaatttttttaacgttgataaaaatggaaccacatttggcatatatgatcatggacactgagtaacgtggatgtggatgtggatgtgaacgtggtcacaattgtgtgttcatttcggaatattcactttctttaattaagaaatttgaaaattgataatataaaatattactataatcatatgtaaaacatatcaatgcagaattgttggagtaaatgctacaaaaaagtttggtttgaaagtgataacagagacgtagcgggtttgattaatggcaagaaacttaatttttcagtctacaattggatcaggaaactcgaagatgggaatcaaggcattttatgtcaaaaacattctctaaccgtgattttatactgattaaagacattccccaacgatctcttaccatgtaataagatctactgatgtaataggatatgaattttgagctagagtgagatgttgtggcaatacatcgtcagtaccatatgcattctgtcacgtcatttgagtggtgtgctcatcaaattttaatagttgaagttacttctagtgataagcagctcaattaagccgccacaaagaatacactgataatcctcaaaaatccgaaaatgcgatttatctttaagagaatgatgataaagaagagtcaaatcacaaaccaaggaacaagtaacatgtttaatttagcatcattagctcgattcggtgcatttgatcttcttcttttttgcctaaaaaattcgttctttgaaggaaaatgagggacaagaagaactaaaggaacttcactggtacaactagagtccgaggatgatcacctcctcaactgctgctaatggtttaatgtcaacatccattgaggccttacaacaattttaaacacacttttgtccgattttactgtttaaaaatcgattcttggtctgaaaatcttgttataagtacgttgttattgatattgcagtaataaaaagagaatagtagtatctaaatactttataataatatgaaaaatataaaacattaacatactttgatttttagtaaagtgaatttggaattattattattgttttctgtcattttaatgaaaaattagactcacatatttaatcacaatttattttaaccaaaaagatgatggcctagtggtagtacaagtgggttggttcccttgtgttccggattcaatccatcttttaggatggagaggcattcttcaaataagagtggactaaaggttgattccaaatacgaaggaagattacggattctttaaataggagtggactaaaagctgattccagatacgaaggaagattacagatcaaatgtctgaaactttcttggttttatcaaagaaaaaaaaaattgactctacaacaaaaaaaatatgttggtataaacaacacaaatgatggttttcagtttcttttattttgttctataagaaacatagctgaccggctatactacagattaagaaaatctccaaacaattatatatatatatatatactatttttttatataggatattcgtttgatgtccagctctagaagagtatgaggaggtgttacggagatgttcgaagagttatatactattttaaaaaataactaggttcaagcttatagttgagtctagtaataaaatagtcttattagtttaaacttaaacacttccaaatctatttaaaatcccatctgaaatcaaatcatcgcgcaaattcttttttttttttttttttatcgagcaaattcttgatattgatgtaacacttaacttactatatattactaatgattttgataaagatattcaaatcaatgattaagtaacacgttattatttatttatttattgcatgttcaaattcattcaactccactaattaatcaattatcacctttaagtttctaatcttgtttctctgtagaatacaatatcttcttcttttttttttgtcgtgtgtagaatacaatatcttttcttaattaagaatctgagtccatgcattcccgtgtcttcttttcttattcttgaggtttgaaactaagactatttttgacattgttctttttgttaaatttttctttttttgacgttgttaggtcaagacctgagagttaagaggaaacagtacaatcatatccaaagcacatccagtaattataatagggccacttgaccgtacatccattaaccaacacatcctgacatgcatactgataataaactaatcatattcccttaaaacgtaacaaattgcagaagcttatataataaaagtttctttgtctacttctttttgttctttttcgttaccaaattagtgtttgacttccaaaatttactcctacaacaaaattattagtgagcgtttataagaaaatattaattatgcaccaatagatataaataacacatgttaatttctcacgttacactggatatgcggatcccatcaaactatttttcatcatagagaattggatcttgaacaacgaaaaagttctaattattataccttaatcatgtgcatgactgcatgtatatattatacaaatgatttcaagatgcttgatgcttatattttggggtgaggtaatagagggatcgagagattagttgtctcttgcctgtcatttctccaatagattattagactaactcacgtgctttttattttgaaaggctgattatttcaacacttccaacaaaactttatgagtacgtatatataaaataaattaatgagttttcttaacctagattaccatggttgcacaagacactagaccctcaaaagagtcagctgtgtctctctcaataactattcgcaagcactttattttcttaagagtataaattttgcaaatatatatctaattaaaggggtctatatttcaattatattcttatatgtgtaactcattggaaataacatgcttctgtgttaatattaccagtgtatggtaaaaaataaaatagaatgagcgatatactgaaaaatctagtgatgatttctatgtatctagtgatagaatagacgagaactatttttccaacgaaaacgtaactcattagttcatatgttttcttttcttttctaaaagaaataatcttaattatttatgtgcatatgtgtgtgtgtgttatttatagataagccctagccaatcacattctaaatatgtattatattagaaagtcttatatatatgtttatatagatcataatttttctttctttctgaaatgtaattttgataaagtgattgtacattttggtttcttttctacctacccattaaaattgacaagttgtaagttgtaacaatgtcataaccaatagttgatacctcagaaacatgtcataaccaatagtccaatactatatcaaatacaaaaacaaatcaagggaagatcttgggttggcgcaatactaacaagtaacaagtgagaaaaaaaagtaatgaaagaaaatacatttttctatatatatgaacaatgattgaacccaccatatattgaggatgaatgcaaattctttgtttatttctgattagcgaccgttgtttaaaatgaacaagatataattgtttgaatacattcttgttggcaatatatagggaagatttaagaagatgatattattaggtattcatgaagatttcgtaatcttttcttaaccctacatcaatattagtattaaaccaaagatcaagggaataatatcttatcaaaatggagaaagattatttcttaactagttgattgatgtgaacaaaataaaataaaaactagttgattaatcatacacaattacaaattatatacagtatgtatctttggtggaatctagctcccctcaagccctctaaggatccttcatcactgaagactcttttacgatctgactctccctttctgttttgttttgtttgtatatattatgtgtttatttgtgtatatataatatgtctatttgtcttataaaatcaaatattttaaactaatttttcttgttaatagaagtaaaaataaaaaaataaaaataaattataactagcaattttcattacaagataaaaatcttatttcatagggtcaaattcgttggtaaatcttcagaaatgtgctttcagatggatttccgaaggattattgtcattagcttaaagtggtcaaaaatccatgtatttcgaaatatctttgaaaatttccgagagtttttcgaaaaactaatatttccgacggtttttgaagagattttcgagaaacaatgcttttgagggatttccagaaaaaataaaattagaagaatttctaagaaacaaatttgtccaggagattttcgaaagacaaatatttccaagaaatatattatttaaattcttagaaaattcgcacaattatcattattcgatcctaaatattcatatttagtaatagatacacattggcatcaaaatctttgagagtattatcagtatcaatcaatctaatgtattattatttttaattaatattatcaaccagtatctatttgtatttgattgcctttcacgcctgcacataaaattcagagtcgtcgtatatatgtataaaaatataatcgtgtttagccattagcacatgagcaagtccaaatctccctctctctctctctatctatctctctatagaaggtaaacttcaacttcatctttcttagactgcttaaatttctcaaattcttgtaaagcttttggaattcaagaaatattaatgttatataatttcattttcttgggttaatagtttcctcatatgattaccaattttcagattttttaactaagaagctagcgatcatggccacagcgatgaacgttttctctaccaaatggtcctccgaattggtatatttctatacacacatacatacatatttatgtgtgcctctctttcctcatatgattttgtatatatataaaatctatattcatgttcttttaacctactttttcttaggcaaatttcacgaatctttattatttgcttttcgtataggatatagaagaatatagtatcatccaccaattccacatgaactcactcgtcggagatgttccacagtctctctcatctcttgatgataccaccacttgttataaccttgatgcttcttgtaataaaagtttggtagaagaaagaccttcaaagatcctcaagaccactcacatatcaccaaacttacatcctttttcttcttctaatcctcctcctccaaagcaccagccctcttctaggattctttcttttgaaaagacaggtttacatgttatgaatcacaactctccaaacttaatatttagccccaaggacgaagaaattggattaccagagcataagaaagccgagctgataataagagggacaaagagagctcaatccttgactcgaagccaatcaaatgctcaagatcacatactggcagagagaaaacggagagagaagcttactcaaagatttgtagctctttccgcgctaattcctggcctaaagaaggtacacatatgtaaaaataaatcttctcttcttcttcttgtttaataaagaggcgcataccaaccaaatgatagtgtagtcttttcttaaataattctattttgctaggcaagaaaccaattttcatggacagtattcactcttttcttatacccacaatgaaagttttgacttcagatctcccggttatgagactaaattatttgaccaggaccgactttgtgaaactcgaaatatactaaaacaaatcctctatatataagaattattacttttttacaaatcatttgcagttccggcttgaaggtttttcatttcgattaaatataaatatatttacatgctatatattgaaatatgcatctatgtcattatagatggacaaggcttctgtgttgggagatgcaataaagcatataaagtacctccaagagagtgtgaaagagtatgaggaacaaaagaaggaaaagacaatggaatcagtggttcttgtaaagaagtctagtctggttttagatgaaaatcatcaaccatcatcatcatcttcctcagatggaaatcgcaatagctcgagctcaaatcttccagaaatagaagttagggtttcaggaaaagatgttcttattaagatcctatgcgagaagcaaaagggtaatgtgatcaagattatgggggagattgaaaagcttggtttgtctatcaccaacagcaatgtcttgccctttggacccacttttgacatctctattatcgctcaggtaactatatattttctcatataagctacaacataactttattctagtattcaacataaatatatatatcgtgtgacaacataaatcaattctatagataatgtacatgtttcagaattagtatgactttggacttaaatattctagtattcgaaaattctaatgatatagtttattctttgcagaagaataacaattttgatatgaaaatcgaggatgttgtgaagaacttgagttttggcttatcaaagctcacttaattggtttcacgttacatacatatacacattcatcatcgatttctccgatcgaagaatccaaaatcagtttttccatgaaagtggttttttagttgttaagtttgttgtatggagattcttaagtcatttaaagatccttgttcttgtgttgttaagtgtgctttaagatgcatatcatcaaatgtttagtaattatttctctccagtttcatttgggacggaatttttttcgcagttgttggatatatatttcctgcgatgtaaagcatttcgttagtttaataaacgtccgatatgtttctttgtattttgataagcttttctgtcaattatagtcactacgatatatttatatgataattactgttaaaatggttgagtagtttactgtttacgataatatttgtctttcaaaccatctatgtttgatatattatggaatttacaggtgaataacgaaagaactgaataaactaaacgagagaaatttttcgtataatacttatgaaaggctaaaaaaaactagttttaataaattaatcacatttttttaacacgatagtggtatacgatatagtgaaaacacaaaattaaataaatattttgaatggtaattataagtaacggaatcacgttttcaaaacgtgaactagttgtgtatacattcaaaccctatatagatgacattgtaggaaagattacgaaaatgccttctgtgaaatataggaagattatatcaatgtaaatgtatataaaatcaaactcaaacaaaaaaaaaaactcttcaatcttaactaaagtatgtatatactccatagagtttgatatatcgcaaacggaaattttaataaactgttataatcaggtttaattaggacgcatttggattcagtctttttcattaaaaatattttggtcagttcacgagcattttgtcaaaaccgtgtaatgacttatgagttatgtctatgtgataaaatgtgtattaaaagtgaaaataaaatcaatttttcatgcaatactttttcagtcgcaccttttcatttgctaatcattatgttttttaaatttatttaattaaatatagtcaaaagtaacgttttaaaacgaggaccgaaattagaaaccttcagttggctagatttaagaaaaaagtcataaagcagacaacttttaccaaagcatgaaggagtgtttgagattctatacgtatattaatctattgaaattttttagttttatgtatgagaaaattcacacattatcagaatgtacatatacatatatagctttctagaaactatagcaattgaatccaaagaaaaaactataatcgtaaaacaaaaacaaaaacaaaaaatatttaattgaattgaaaacgtgggagtagacctcaattttataagtaattaaactaatttccactccccatgatttagttcacatcttacggaaaaaagtaaaaagcaaaagttatagttatagtggaaattccttaaaaacaggcgaccaaagcaatgcatgagccatgagttatttaattgaattaaaaacgtggcattttccttattctattggaaactcgtttcacggaggtcaaacaaatgtgaaaaccaaaagtgttctttggagttttgttttgtcttcgtcaggtccaaaaagtccaaccaaaatgcctagaaggtcacataaacttaagtacctaacaggctaacagcaatcttaattacatgatattttgtttctggaccataattgtccttaatgatgggaagagaaaggctactggtatatttctgaaactagtaggggtattagataagaaataacgcttatactatatataatttacatttgttagaatttttttatctaacttggttttgggttttgatggaaaatatcttattaaattatagtaggagctcgcttataagaattttgttttgttgtcttctctcttctcgctttgaagaaattcaacatatgataaactaaaaaaattagtacgtagtctataattataataactcatttttgtttttgatattatatgaagaattcaaataattacggatccagtggctaaccaataacactaacaattttcatacctaaaatctattttttttgtatataaaatagaataatataaatggttagttcccaactattagaattatggacgaaggaaaaagacaaaattggaaggccccttaacagtgagtttgattaggacgacaataataaaatgaaaatgattggtcctatccaaactcattgacgaaatagtgtgttaatgtaataatatgatatataaaaaagaaaaaggaaaagagagtgtgtgagtaaaagattggtcgtcagctggatttatgatatttcggcggcatatcccgtccccaccgcaccaccaaccggaaggaccatggcatggatacacatttgtctcactttatatcataaataaaaaaatattatatgttatccagatttcgtatccaaaattttctaacaaaatctccattttataattctactgacctttttaaaaggcactgttgtgacttcatttcaagagatacgtaccaaatctttattatcaaatatatcgtgacgatagacatgtacacacatataattgtagtacgcattactacggaaagaatattccaagagcttaccaattccatgccgcatacattggcgtttatcctaagttagacttaggattcctaacgttccgaatttgcgttggagagcaagttcctgatctgcttacggaaaaatatattcaaactcaaattgcgaatgccgagaccatttcaatttttgggtttttgtcgaagggatgatgagcaaattaaagctagtccacctttttaataaaattgcttgtgaagaagaaacaattaggtccaatattactagagacaaaggcaatttataattttaatatttttggtactgtttaaaaaaaactatcagtaccaattgaacaatttctaattttgatatttataatttagttaaaaatatgtttgtcatattaattctttttttgctcatattaattcattatccagttttttagtcattacatttttattttttttttgtttagtcattacattgaattagtcgaatcagtacataatcgtttcatcagagaactagtgaattaaaccgacccagactaattggaagccttaattttggatcttatattgtaggcatattaactttttaattttcttacataaatccttcatatgaaatgtttgtttttaaatggccatggcccagaaccattgcatttttgggctggatagtggatgtatatgtgaattcgtcatcataccaacctggtctggcctcttattagtgcagttaagactaaataacccgtttggtagggagtagggacatttattatgtctggggtcgttatcgccttatcggaatcaaattgagtttaaagacaaaacagtatgatcgattaattatcaaacacaacttgtttataaatgtatagatgtcgacatccacatggtatcataacttcttctgcaacatatccctcgatatcatatccaccattaatctaatttattgcagtataacgagtcgagatatgttcatgaattttcaaactcattaaaaaattgttgtaattttttgtttcgtaagtaaattttgttttttttctctttcaatttaacaatgtaattttctggatgaaaaatttgcaaacggtataaaacttaacatttcatatgatttttttttggataaaattacaattaaaataataaataaaagataataaagtataacttttgtatattttcctttataaaaagtaatgaggttgttagatggacgggaagacggggacgaggctttacagagtttttctatatccttgttgtttccgagtgggaataagctcaacaccaaaaacacgtgcttattttatttacacgtctctcttctcttactttttttttttgggtccataacacgtagttttttttttttcaaattcataacacgtatatgaatctcagaccactagaagccaacaaattatacgatcattatagacaataatgagaagacttctagtttcgatcataatatgtttagtttatacatatacgtcacgttttatgcattatatacacaatctggtcaacataattatggagtggagaaaataatttaagccgcgtctcgttgtcgaatatatagtaagaatacctgaaaacactttctattcataaaccctttacgacaaaacaataaagacgtctctcgatttatctttgtcttaatcaggaaactatttgacatttctttatcgattattacttcatattcgggtatggatgaagattttttcttacccgatttctcactagtagacattgatttcgactttaatatttacgaagaaaataatttatcacctgatgaatctttatcaaattcacgaagagctgatcaatcgtcaaagtttgatcatcaaatgcattttgagtgcctcagagagaagccaaaggcagcggtgaagcctatgatgaagatcaacaacaagcaacaactgatttcttttgatttctctagtaatgttatttcttctccagccgcggaggagatcattatggataaattggttggtcgtggaaccaaaagaaaaacatgttctcatggcacaagatctccggttcttgcgaaagaacatgttttagccgagagaaagcgccgtgagaagctttctgaaaaattcattgctctttcagctctccttcccgggcttaagaaggtattgcaaatttaaattgtaaattatcgataaatttgttatatatttaactatagatattttcatagtgaagaaaaaataataattcatcagtgtcaattggttttgagaatacaaaactatcttgtggttttttaggcggacaaggtaacgattcttgatgacgcgatctcgcgtatgaaacaactccaagaacaactaagaacgctcaaggaagaaaaagaagcaacgagacaaatggaatccatgattcttgtaaagaaatctaaagtgtttttcgacgaggaacctaacctatcatgttctccttcagttcatattgaattcgatcaagcattaccagaaatcgaagcgaaaatttctcaaaatgacattctcatccgaatcctttgcgagaaaagcaaagggtgcatgatcaacatactaaacacaattgaaaactttcaattgcgcattgaaaatagcatcgtattgccattcggagactcgactctcgacatcacagtccttgcacaggtgatcattaataactatatatatatgcaatactaaaatggataactcgtagttcatccaatataatattgatgtattaatgaaactgataatctacaattatgctttcttaactttttgtgtggcagatggataaagatttttcgatgagtatacttaaggatcttgtacggaacctgagactcgcaatggtttaggtcttctttcaagttttagtaacctgagactgtacattgacacaatcgtttcgtggatttgctatcgttttcttcttgagattttttcacacgtgcccacatgtttgatgtgtttttttagcaaagctatttccgataacgaccgttgagaattaatttagatgtaacattttttgtttgttaataatgaatttaaaatataacagaattgtttttttattaagtggcagaaataaatgtggccttatccgctgtccaaaaaaaaaaaacaaatgtggccttatccttagcatggtcgtaatgccttctgacttgttaaagtattttgtaattattgacaaaccctcttcaattcttaatgaaattcacattcatgtcaacaagaaacatattgtagaaagcaaaccttttaaccaatcaaaaaaaaaaaaaaaaaggaaaagaagattgcttgacattaaaaagatattgtagaaagcaaaattacatcgaaggtcaatgttacaaaattctgaaatatttacgaaaaaatagtagggcatgaaaatggattaaaagaattaacttaattatctatagttttgccccaataaagatatacaattatagttttcgtaatttattttgaaagtttcagtagttagcaaattcaacaacttagctacatttgctttcgacaaaaaaaaaagctacatttgctcaaaaaaaaatgacgctaaattcaaccaaatttattactatttaccaataactatttagaagtcatagggcaagggcagtatcggagggacgtgaccaaataataattgccgcacgacgcggtacgattaaaagccaattcaaaacctttgagtaccacctaacaaaatcatttcttggatacgtttatactcaccccaaatctgggatactaatcaattataaagttaagataaagatttttaataaaaataataattcagcgcatcgattaagaataaaattacaataaattaagcttattaaaatttctttcttatttcttgatttccgatataaatagtcacacgatcaagggtcagctatagcttgataacatttaactttgtgatcttcggattgacacatgtcttatctctgttaataacgcttttaaatggctcatataccaaaatgttttgcctaattacttctcttaataagtttcgaatttaaaaactcccttcatatcgagaaaggagtgatcacatgaatcacatgtactatatatcacgtgatcaattcaatccgttaaaagtttttttttccttccgtcaacaacttgtcttttgccacaaacaaaaaagttaaaggatagtcaaccactgtgaatacctcacaataattaattactatatattttatggtttccatctctttgaatatcgacacgaacatgttacttcagcttccattgtcttggattttgattagtgaataatcgtagaggttttgacataaccacaagagcatgtgtgccataatatgcttgattaatgatagttttccctgattcaccttaattatattgtctaatttgctattatagtatcattcagagcatgcagatgaaaaaactaaattcggtgggaaaagaagaagtcaatttcacgggacactagtttgtaatcaaaattgttatatttaatgaaaaaaacactctcgggacgatttaactctaaagtctctaaccactgcagttgaaagtttatcaaaagcgtggccatatgtatacatgagaaatcacgtgtttgctctattacgtagtcaacatcacctttaaatatcattgttattgataacttaaggaattaatcaatcgtcgttcaaacattgcattatgtaagtaaatgcatttgtaaccattcatctacattttaaaagcgtttttttttttttgtcgaaatacattttaaaagcgttaagacttgagagagtagtcttaatcaattgttaggtataaatttttttccagaattgataacgaacatccataatacaaaaaaaaaattagaaattcggattttccttattagaaatatttactaacgaacattcataaaaccataaccacagttttaaacttgtggagatgatttttgtttttttcatgtatatagaaaaattatttgaaggttcagttttttaacaacataaattataaacaaaaaaaaaagtccagatggtgatagcgtggtataatactagcataaccacaacttagattacaatctacaaatcatgttcaatctgacgagtttcaaaaatacccaaaagtttttgttggaaacaaattaagagtgaactgaaaatctttctttgataatgtggagtttatgtactccattaaattattcaaacgatccttgtagtgagaaggttcattcgatatttgtttatcatcataaatctccgcaattaatatgtagacaataacaataaataaaatttgtaaggagtaacatggagggtggagatcattaactgatataaactataaaggctttaataaaatggatctcaatcttttccagaaagaatagcatcttaaaggtggatatatcatgaaatcatttttactcaattttgttatatattattcacgaaccatttaaattatttgtattaaataattcagataaagagtaaagtaatgacatgtacgagtactactaattaatctggtgtttgcctgtttgtatattcgtacagatctcaaattgttatttcttttttgaattataattaatcaagacgtataactaatactctctctgttcatcttaatatgcattgcaatatggtgcttacacaaaaaaaaaaaaagcattgcaatatgggaaaaaattatttattatccacataaacactgttggtgataaatatttgttatgtatagtaacattgtatgcttgaggtacactgaaccacatttttttcaattcaccaattaatgatgtgaataaagacatcaagacaaaaagaaaaaaaaaacagaaaaaaagacatcaagacttcattgagcccgtaaccaaaattatcaaaacaattattatcccttcatatatggatgtaagttgtatggaaaatgattacattcacaacaaatgtgttttttgttttgttttttggcaatgcatattgtaaatttaattacgaatggcatgacacatggatgatatttaaacaaaccactatatcacatatgttgtcgctataaaaaatatttattattgggttaatcgatcccaggtcctagaattagttttgatctctttgctatatataagaacaatcggtatattataataagaatgcattgacctaaaaaatactattaataataatattaatgcaataatgaggcaaaacaattaatcacacatgattcacgaggataggaaaatggttccagagacaacttcacaaagagtgattattatggtatttattgtattttaattattaaaaaaaaaggaaattaacagcaaaatctatattgtaaactcactttacgtagaaaaacttcttcgatataatattatggctttgattggtaggttatgaggacgtggaaaacatagattaaaaggcaattctaaaaaagaccactaaaatgattttgttcggaaaataccatttagtatttttgattatttttttcaaaaatactactaaaagattttttcctaaataccacaaaactaaaactaaatataaaattttcagaattaaatcctaaatcctgaaaaataacctttaaaattaaaccctaatcccaaaatactaaattcaaacccaaaattttaaattttaaacccctaaaaatcatttttagtgtttgtgttattcttactaaccgcaatccgtctcataaccagttaagcatataggatattttacaaattcctatgcaatgtgaaatatagttgactatttgtattctggaatcttttatatcatggttgaatttttaaattaattagtaaaaaataattcttaaaagtgttttttggaaaaatattgattttgctaaagttttttggaacaatcatgaatctgcgctgctgtattaataacttaattagtaattctatacacaaactcaattatagatcttcgattcacaaagaagcacggaaattaagattgtgtatagaactaatcttaatttcataagtaactaatttataattaagttataatttattcacaatctcaattataaatttgactcaattataacttaaatatttcaccatttatttaatcacagttaattattattttttaatttgtccagacagattcaacgggagcctcgtattattgcataaacaagtaggagttatataaacatagtatttttcaacctctactggctttagaatataaatatccaattatcatctatatgataagcgtaaaatctattctacgtcacgaaggattggattttattggagttttcttataataaaactaatgattttggacattgataagcaaattcggatctgtagtgggaccaagttacttgcaataacacgtggggagttgagttcaaatctttatatgttgatcatttgatgtgttggcacgatcagtggttttgttttattttttgaacaagcatcatcagtgtttaaaatagtgaacatgataacttacttatatcattaggggtaaatattagctatcaactatcaagtacgagctaatcataaaatgatatatgaactttagacccataatatgatatcttcaagactacttaaaacctcaattttctgaaatatactatgcaaatacccaaaacacttaaactaacagagcatttacatatcctcttttgcatctgcatttttttttttttttctaattttgagcatcgaaagatcttcgaaaataactttttatgctcctaacgatcgattttgacaattttcttcgtggtctatttaaatactgcacaaactatcacaattttgtctaataaaaaaacttacaatatttatcattgttttcttccagtttatccatatgtcatatgctttatctacatttaatctaattcgtccacgtgatgggctgtggtttttttttttcttacctaaagtcatagactcacaaatctatatttctatcaagatggatacatttatggtacgaatcacatgattttgatctttaattaaagtcttgttagttttccaatgccagatctcatcgcatcggtggctactcaaatccccacctattaataccaatttcaaccaaaacaattcccacatttaattattttcaggacctttaatttactaaaatttattattgctaaacctaccggatcgggtaaacggatatgcgattcgtcagccaaattcatataacaattataaaccatatgctctttttccatgcagatattaattgtatactgcaaaataatgattataaaaaacaaaatcatatagatccactataaagagttcactcgaccacattcacataacaaaacaaaatcatacatactccagaacaaaggaaaatttaaaatatatctccttatatactcctaaagttttctttcctttagcttcttgtttagttttattctttcaacattaacttttttttactctcttgtcaaaagagaaaaagagttcttgtaatggatgattcaagctt

SEQ ID NO: 267 - DNA, 53882 bp, Arabidopsis thaliana
aagcttatagttgagtctagtaataaaatagtcttattagtttaaacttaaacacttccaaatctatttaaaatcccatctgaaatcaaatcatcgcgcaaattcttttttttttttttttttatcgagcaaattcttgatattgatgtaacacttaacttactatatattactaatgattttgataaagatattcaaatcaatgattaagtaacacgttattatttatttatttattgcatgttcaaattcattcaactccactaattaatcaattatcacctttaagtttctaatcttgtttctctgtagaatacaatatcttcttcttttttttttgtcgtgtgtagaatacaatatcttttcttaattaagaatctgagtccatgcattcccgtgtcttcttttcttattcttgaggtttgaaactaagactatttttgacattgttctttttgttaaatttttctttttttgacgttgttaggtcaagacctgagagttaagaggaaacagtacaatcatatccaaagcacatccagtaattataatagggccacttgaccgtacatccattaaccaacacatcctgacatgcatactgataataaactaatcatattcccttaaaacgtaacaaattgcagaagcttatataataaaagtttctttgtctacttctttttgttctttttcgttaccaaattagtgtttgacttccaaaatttactcctacaacaaaattattagtgagcgtttataagaaaatattaattatgcaccaatagatataaataacacatgttaatttctcacgttacactggatatgcggatcccatcaaactatttttcatcatagagaattggatcttgaacaacgaaaaagttctaattattataccttaatcatgtgcatgactgcatgtatatattatacaaatgatttcaagatgcttgatgcttatattttggggtgaggtaatagagggatcgagagattagttgtctcttgcctgtcatttctccaatagattattagactaactcacgtgctttttattttgaaaggctgattatttcaacacttccaacaaaactttatgagtacgtatatataaaataaattaatgagttttcttaacctagattaccatggttgcacaagacactagaccctcaaaagagtcagctgtgtctctctcaataactattcgcaagcactttattttcttaagagtataaattttgcaaatatatatctaattaaaggggtctatatttcaattatattcttatatgtgtaactcattggaaataacatgcttctgtgttaatattaccagtgtatggtaaaaaataaaatagaatgagcgatatactgaaaaatctagtgatgatttctatgtatctagtgatagaatagacgagaactatttttccaacgaaaacgtaactcattagttcatatgttttcttttcttttctaaaagaaataatcttaattatttatgtgcatatgtgtgtgtgtgttatttatagataagccctagccaatcacattctaaatatgtattatattagaaagtcttatatatatgtttatatagatcataatttttctttctttctgaaatgtaattttgataaagtgattgtacattttggtttcttttctacctacccattaaaattgacaagttgtaagttgtaacaatgtcataaccaatagttgatacctcagaaacatgtcataaccaatagtccaatactatatcaaatacaaaaacaaatcaagggaagatcttgggttggcgcaatactaacaagtaacaagtgagaaaaaaaagtaatgaaagaaaatacatttttctatatatatgaacaatgattgaacccaccatatattgaggatgaatgcaaattctttgtttatttctgattagcgaccgttgtttaaaatgaacaagatataattgtttgaatacattcttgttggcaatatatagggaagatttaagaagatgatattattaggtattcatgaagatttcgtaatcttttcttaaccctacatcaatattagtattaaaccaaagatcaagggaataatatcttatcaaaatggagaaagattatttcttaactagttgattgatgtgaacaaaataaaataaaaactagttgattaatcatacacaattacaaattatatacagtatgtatctttggtggaatctagctcccctcaagccctctaaggatccttcatcactgaagactcttttacgatctgactctccctttctgttttgttttgtttgtatatattatgtgtttatttgtgtatatataatatgtctatttgtcttataaaatcaaatattttaaactaatttttcttgttaatagaagtaaaaataaaaaaataaaaataaattataactagcaattttcattacaagataaaaatcttatttcatagggtcaaattcgttggtaaatcttcagaaatgtgctttcagatggatttccgaaggattattgtcattagcttaaagtggtcaaaaatccatgtatttcgaaatatctttgaaaatttccgagagtttttcgaaaaactaatatttccgacggtttttgaagagattttcgagaaacaatgcttttgagggatttccagaaaaaataaaattagaagaatttctaagaaacaaatttgtccaggagattttcgaaagacaaatatttccaagaaatatattatttaaattcttagaaaattcgcacaattatcattattcgatcctaaatattcatatttagtaatagatacacattggcatcaaaatctttgagagtattatcagtatcaatcaatctaatgtattattatttttaattaatattatcaaccagtatctatttgtatttgattgcctttcacgcctgcacataaaattcagagtcgtcgtatatatgtataaaaatataatcgtgtttagccattagcacatgagcaagtccaaatctccctctctctctctctatctatctctctatagaaggtaaacttcaacttcatctttcttagactgcttaaatttctcaaattcttgtaaagcttttggaattcaagaaatattaatgttatataatttcattttcttgggttaatagtttcctcatatgattaccaattttcagattttttaactaagaagctagcgatcatggccacagcgatgaacgttttctctaccaaatggtcctccgaattggtatatttctatacacacatacatacatatttatgtgtgcctctctttcctcatatgattttgtatatatataaaatctatattcatgttcttttaacctactttttcttaggcaaatttcacgaatctttattatttgcttttcgtataggatatagaagaatatagtatcatccaccaattccacatgaactcactcgtcggagatgttccacagtctctctcatctcttgatgataccaccacttgttataaccttgatgcttcttgtaataaaagtttggtagaagaaagaccttcaaagatcctcaagaccactcacatatcaccaaacttacatcctttttcttcttctaatcctcctcctccaaagcaccagccctcttctaggattctttcttttgaaaagacaggtttacatgttatgaatcacaactctccaaacttaatatttagccccaaggacgaagaaattggattaccagagcataagaaagccgagctgataataagagggacaaagagagctcaatccttgactcgaagccaatcaaatgctcaagatcacatactggcagagagaaaacggagagagaagcttactcaaagatttgtagctctttccgcgctaattcctggcctaaagaaggtacacatatgtaaaaataaatcttctcttcttcttcttgtttaataaagaggcgcataccaaccaaatgatagtgtagtcttttcttaaataattctattttgctaggcaagaaaccaattttcatggacagtattcactcttttcttatacccacaatgaaagttttgacttcagatctcccggttatgagactaaattatttgaccaggaccgactttgtgaaactcgaaatatactaaaacaaatcctctatatataagaattattacttttttacaaatcatttgcagttccggcttgaaggtttttcatttcgattaaatataaatatatttacatgctatatattgaaatatgcatctatgtcattatagatggacaaggcttctgtgttgggagatgcaataaagcatataaagtacctccaagagagtgtgaaagagtatgaggaacaaaagaaggaaaagacaatggaatcagtggttcttgtaaagaagtctagtctggttttagatgaaaatcatcaaccatcatcatcatcttcctcagatggaaatcgcaatagctcgagctcaaatcttccagaaatagaagttagggtttcaggaaaagatgttcttattaagatcctatgcgagaagcaaaagggtaatgtgatcaagattatgggggagattgaaaagcttggtttgtctatcaccaacagcaatgtcttgccctttggacccacttttgacatctctattatcgctcaggtaactatatattttctcatataagctacaacataactttattctagtattcaacataaatatatatatcgtgtgacaacataaatcaattctatagataatgtacatgtttcagaattagtatgactttggacttaaatattctagtattcgaaaattctaatgatatagtttattctttgcagaagaataacaattttgatatgaaaatcgaggatgttgtgaagaacttgagttttggcttatcaaagctcacttaattggtttcacgttacatacatatacacattcatcatcgatttctccgatcgaagaatccaaaatcagtttttccatgaaagtggttttttagttgttaagtttgttgtatggagattcttaagtcatttaaagatccttgttcttgtgttgttaagtgtgctttaagatgcatatcatcaaatgtttagtaattatttctctccagtttcatttgggacggaatttttttcgcagttgttggatatatatttcctgcgatgtaaagcatttcgttagtttaataaacgtccgatatgtttctttgtattttgataagcttttctgtcaattatagtcactacgatatatttatatgataattactgttaaaatggttgagtagtttactgtttacgataatatttgtctttcaaaccatctatgtttgatatattatggaatttacaggtgaataacgaaagaactgaataaactaaacgagagaaatttttcgtataatacttatgaaaggctaaaaaaaactagttttaataaattaatcacatttttttaacacgatagtggtatacgatatagtgaaaacacaaaattaaataaatattttgaatggtaattataagtaacggaatcacgttttcaaaacgtgaactagttgtgtatacattcaaaccctatatagatgacattgtaggaaagattacgaaaatgccttctgtgaaatataggaagattatatcaatgtaaatgtatataaaatcaaactcaaacaaaaaaaaaaactcttcaatcttaactaaagtatgtatatactccatagagtttgatatatcgcaaacggaaattttaataaactgttataatcaggtttaattaggacgcatttggattcagtctttttcattaaaaatattttggtcagttcacgagcattttgtcaaaaccgtgtaatgacttatgagttatgtctatgtgataaaatgtgtattaaaagtgaaaataaaatcaatttttcatgcaatactttttcagtcgcaccttttcatttgctaatcattatgttttttaaatttatttaattaaatatagtcaaaagtaacgttttaaaacgaggaccgaaattagaaaccttcagttggctagatttaagaaaaaagtcataaagcagacaacttttaccaaagcatgaaggagtgtttgagattctatacgtatattaatctattgaaattttttagttttatgtatgagaaaattcacacattatcagaatgtacatatacatatatagctttctagaaactatagcaattgaatccaaagaaaaaactataatcgtaaaacaaaaacaaaaacaaaaaatatttaattgaattgaaaacgtgggagtagacctcaattttataagtaattaaactaatttccactccccatgatttagttcacatcttacggaaaaaagtaaaaagcaaaagttatagttatagtggaaattccttaaaaacaggcgaccaaagcaatgcatgagccatgagttatttaattgaattaaaaacgtggcattttccttattctattggaaactcgtttcacggaggtcaaacaaatgtgaaaaccaaaagtgttctttggagttttgttttgtcttcgtcaggtccaaaaagtccaaccaaaatgcctagaaggtcacataaacttaagtacctaacaggctaacagcaatcttaattacatgatattttgtttctggaccataattgtccttaatgatgggaagagaaaggctactggtatatttctgaaactagtaggggtattagataagaaataacgcttatactatatataatttacatttgttagaatttttttatctaacttggttttgggttttgatggaaaatatcttattaaattatagtaggagctcgcttataagaattttgttttgttgtcttctctcttctcgctttgaagaaattcaacatatgataaactaaaaaaattagtacgtagtctataattataataactcatttttgtttttgatattatatgaagaattcaaataattacggatccagtggctaaccaataacactaacaattttcatacctaaaatctattttttttgtatataaaatagaataatataaatggttagttcccaactattagaattatggacgaaggaaaaagacaaaattggaaggccccttaacagtgagtttgattaggacgacaataataaaatgaaaatgattggtcctatccaaactcattgacgaaatagtgtgttaatgtaataatatgatatataaaaaagaaaaaggaaaagagagtgtgtgagtaaaagattggtcgtcagctggatttatgatatttcggcggcatatcccgtccccaccgcaccaccaaccggaaggaccatggcatggatacacatttgtctcactttatatcataaataaaaaaatattatatgttatccagatttcgtatccaaaattttctaacaaaatctccattttataattctactgacctttttaaaaggcactgttgtgacttcatttcaagagatacgtaccaaatctttattatcaaatatatcgtgacgatagacatgtacacacatataattgtagtacgcattactacggaaagaatattccaagagcttaccaattccatgccgcatacattggcgtttatcctaagttagacttaggattcctaacgttccgaatttgcgttggagagcaagttcctgatctgcttacggaaaaatatattcaaactcaaattgcgaatgccgagaccatttcaatttttgggtttttgtcgaagggatgatgagcaaattaaagctagtccacctttttaataaaattgcttgtgaagaagaaacaattaggtccaatattactagagacaaaggcaatttataattttaatatttttggtactgtttaaaaaaaactatcagtaccaattgaacaatttctaattttgatatttataatttagttaaaaatatgtttgtcatattaattctttttttgctcatattaattcattatccagttttttagtcattacatttttattttttttttgtttagtcattacattgaattagtcgaatcagtacataatcgtttcatcagagaactagtgaattaaaccgacccagactaattggaagccttaattttggatcttatattgtaggcatattaactttttaattttcttacataaatccttcatatgaaatgtttgtttttaaatggccatggcccagaaccattgcatttttgggctggatagtggatgtatatgtgaattcgtcatcataccaacctggtctggcctcttattagtgcagttaagactaaataacccgtttggtagggagtagggacatttattatgtctggggtcgttatcgccttatcggaatcaaattgagtttaaagacaaaacagtatgatcgattaattatcaaacacaacttgtttataaatgtatagatgtcgacatccacatggtatcataacttcttctgcaacatatccctcgatatcatatccaccattaatctaatttattgcagtataacgagtcgagatatgttcatgaattttcaaactcattaaaaaattgttgtaattttttgtttcgtaagtaaattttgttttttttctctttcaatttaacaatgtaattttctggatgaaaaatttgcaaacggtataaaacttaacatttcatatgatttttttttggataaaattacaattaaaataataaataaaagataataaagtataacttttgtatattttcctttataaaaagtaatgaggttgttagatggacgggaagacggggacgaggctttacagagtttttctatatccttgttgtttccgagtgggaataagctcaacaccaaaaacacgtgcttattttatttacacgtctctcttctcttactttttttttttgggtccataacacgtagttttttttttttcaaattcataacacgtatatgaatctcagaccactagaagccaacaaattatacgatcattatagacaataatgagaagacttctagtttcgatcataatatgtttagtttatacatatacgtcacgttttatgcattatatacacaatctggtcaacataattatggagtggagaaaataatttaagccgcgtctcgttgtcgaatatatagtaagaatacctgaaaacactttctattcataaaccctttacgacaaaacaataaagacgtctctcgatttatctttgtcttaatcaggaaactatttgacatttctttatcgattattacttcatattcgggtatggatgaagattttttcttacccgatttctcactagtagacattgatttcgactttaatatttacgaagaaaataatttatcacctgatgaatctttatcaaattcacgaagagctgatcaatcgtcaaagtttgatcatcaaatgcattttgagtgcctcagagagaagccaaaggcagcggtgaagcctatgatgaagatcaacaacaagcaacaactgatttcttttgatttctctagtaatgttatttcttctccagccgcggaggagatcattatggataaattggttggtcgtggaaccaaaagaaaaacatgttctcatggcacaagatctccggttcttgcgaaagaacatgttttagccgagagaaagcgccgtgagaagctttctgaaaaattcattgctctttcagctctccttcccgggcttaagaaggtattgcaaatttaaattgtaaattatcgataaatttgttatatatttaactatagatattttcatagtgaagaaaaaataataattcatcagtgtcaattggttttgagaatacaaaactatcttgtggttttttaggcggacaaggtaacgattcttgatgacgcgatctcgcgtatgaaacaactccaagaacaactaagaacgctcaaggaagaaaaagaagcaacgagacaaatggaatccatgattcttgtaaagaaatctaaagtgtttttcgacgaggaacctaacctatcatgttctccttcagttcatattgaattcgatcaagcattaccagaaatcgaagcgaaaatttctcaaaatgacattctcatccgaatcctttgcgagaaaagcaaagggtgcatgatcaacatactaaacacaattgaaaactttcaattgcgcattgaaaatagcatcgtattgccattcggagactcgactctcgacatcacagtccttgcacaggtgatcattaataactatatatatatgcaatactaaaatggataactcgtagttcatccaatataatattgatgtattaatgaaactgataatctacaattatgctttcttaactttttgtgtggcagatggataaagatttttcgatgagtatacttaaggatcttgtacggaacctgagactcgcaatggtttaggtcttctttcaagttttagtaacctgagactgtacattgacacaatcgtttcgtggatttgctatcgttttcttcttgagattttttcacacgtgcccacatgtttgatgtgtttttttagcaaagctatttccgataacgaccgttgagaattaatttagatgtaacattttttgtttgttaataatgaatttaaaatataacagaattgtttttttattaagtggcagaaataaatgtggccttatccgctgtccaaaaaaaaaaaacaaatgtggccttatccttagcatggtcgtaatgccttctgacttgttaaagtattttgtaattattgacaaaccctcttcaattcttaatgaaattcacattcatgtcaacaagaaacatattgtagaaagcaaaccttttaaccaatcaaaaaaaaaaaaaaaaaggaaaagaagattgcttgacattaaaaagatattgtagaaagcaaaattacatcgaaggtcaatgttacaaaattctgaaatatttacgaaaaaatagtagggcatgaaaatggattaaaagaattaacttaattatctatagttttgccccaataaagatatacaattatagttttcgtaatttattttgaaagtttcagtagttagcaaattcaacaacttagctacatttgctttcgacaaaaaaaaaagctacatttgctcaaaaaaaaatgacgctaaattcaaccaaatttattactatttaccaataactatttagaagtcatagggcaagggcagtatcggagggacgtgaccaaataataattgccgcacgacgcggtacgattaaaagccaattcaaaacctttgagtaccacctaacaaaatcatttcttggatacgtttatactcaccccaaatctgggatactaatcaattataaagttaagataaagatttttaataaaaataataattcagcgcatcgattaagaataaaattacaataaattaagcttattaaaatttctttcttatttcttgatttccgatataaatagtcacacgatcaagggtcagctatagcttgataacatttaactttgtgatcttcggattgacacatgtcttatctctgttaataacgcttttaaatggctcatataccaaaatgttttgcctaattacttctcttaataagtttcgaatttaaaaactcccttcatatcgagaaaggagtgatcacatgaatcacatgtactatatatcacgtgatcaattcaatccgttaaaagtttttttttccttccgtcaacaacttgtcttttgccacaaacaaaaaagttaaaggatagtcaaccactgtgaatacctcacaataattaattactatatattttatggtttccatctctttgaatatcgacacgaacatgttacttcagcttccattgtcttggattttgattagtgaataatcgtagaggttttgacataaccacaagagcatgtgtgccataatatgcttgattaatgatagttttccctgattcaccttaattatattgtctaatttgctattatagtatcattcagagcatgcagatgaaaaaactaaattcggtgggaaaagaagaagtcaatttcacgggacactagtttgtaatcaaaattgttatatttaatgaaaaaaacactctcgggacgatttaactctaaagtctctaaccactgcagttgaaagtttatcaaaagcgtggccatatgtatacatgagaaatcacgtgtttgctctattacgtagtcaacatcacctttaaatatcattgttattgataacttaaggaattaatcaatcgtcgttcaaacattgcattatgtaagtaaatgcatttgtaaccattcatctacattttaaaagcgtttttttttttttgtcgaaatacattttaaaagcgttaagacttgagagagtagtcttaatcaattgttaggtataaatttttttccagaattgataacgaacatccataatacaaaaaaaaaattagaaattcggattttccttattagaaatatttactaacgaacattcataaaaccataaccacagttttaaacttgtggagatgatttttgtttttttcatgtatatagaaaaattatttgaaggttcagttttttaacaacataaattataaacaaaaaaaaaagtccagatggtgatagcgtggtataatactagcataaccacaacttagattacaatctacaaatcatgttcaatctgacgagtttcaaaaatacccaaaagtttttgttggaaacaaattaagagtgaactgaaaatctttctttgataatgtggagtttatgtactccattaaattattcaaacgatccttgtagtgagaaggttcattcgatatttgtttatcatcataaatctccgcaattaatatgtagacaataacaataaataaaatttgtaaggagtaacatggagggtggagatcattaactgatataaactataaaggctttaataaaatggatctcaatcttttccagaaagaatagcatcttaaaggtggatatatcatgaaatcatttttactcaattttgttatatattattcacgaaccatttaaattatttgtattaaataattcagataaagagtaaagtaatgacatgtacgagtactactaattaatctggtgtttgcctgtttgtatattcgtacagatctcaaattgttatttcttttttgaattataattaatcaagacgtataactaatactctctctgttcatcttaatatgcattgcaatatggtgcttacacaaaaaaaaaaaaagcattgcaatatgggaaaaaattatttattatccacataaacactgttggtgataaatatttgttatgtatagtaacattgtatgcttgaggtacactgaaccacatttttttcaattcaccaattaatgatgtgaataaagacatcaagacaaaaagaaaaaaaaaacagaaaaaaagacatcaagacttcattgagcccgtaaccaaaattatcaaaacaattattatcccttcatatatggatgtaagttgtatggaaaatgattacattcacaacaaatgtgttttttgttttgttttttggcaatgcatattgtaaatttaattacgaatggcatgacacatggatgatatttaaacaaaccactatatcacatatgttgtcgctataaaaaatatttattattgggttaatcgatcccaggtcctagaattagttttgatctctttgctatatataagaacaatcggtatattataataagaatgcattgacctaaaaaatactattaataataatattaatgcaataatgaggcaaaacaattaatcacacatgattcacgaggataggaaaatggttccagagacaacttcacaaagagtgattattatggtatttattgtattttaattattaaaaaaaaaggaaattaacagcaaaatctatattgtaaactcactttacgtagaaaaacttcttcgatataatattatggctttgattggtaggttatgaggacgtggaaaacatagattaaaaggcaattctaaaaaagaccactaaaatgattttgttcggaaaataccatttagtatttttgattatttttttcaaaaatactactaaaagattttttcctaaataccacaaaactaaaactaaatataaaattttcagaattaaatcctaaatcctgaaaaataacctttaaaattaaaccctaatcccaaaatactaaattcaaacccaaaattttaaattttaaacccctaaaaatcatttttagtgtttgtgttattcttactaaccgcaatccgtctcataaccagttaagcatataggatattttacaaattcctatgcaatgtgaaatatagttgactatttgtattctggaatcttttatatcatggttgaatttttaaattaattagtaaaaaataattcttaaaagtgttttttggaaaaatattgattttgctaaagttttttggaacaatcatgaatctgcgctgctgtattaataacttaattagtaattctatacacaaactcaattatagatcttcgattcacaaagaagcacggaaattaagattgtgtatagaactaatcttaatttcataagtaactaatttataattaagttataatttattcacaatctcaattataaatttgactcaattataacttaaatatttcaccatttatttaatcacagttaattattattttttaatttgtccagacagattcaacgggagcctcgtattattgcataaacaagtaggagttatataaacatagtatttttcaacctctactggctttagaatataaatatccaattatcatctatatgataagcgtaaaatctattctacgtcacgaaggattggattttattggagttttcttataataaaactaatgattttggacattgataagcaaattcggatctgtagtgggaccaagttacttgcaataacacgtggggagttgagttcaaatctttatatgttgatcatttgatgtgttggcacgatcagtggttttgttttattttttgaacaagcatcatcagtgtttaaaatagtgaacatgataacttacttatatcattaggggtaaatattagctatcaactatcaagtacgagctaatcataaaatgatatatgaactttagacccataatatgatatcttcaagactacttaaaacctcaattttctgaaatatactatgcaaatacccaaaacacttaaactaacagagcatttacatatcctcttttgcatctgcatttttttttttttttctaattttgagcatcgaaagatcttcgaaaataactttttatgctcctaacgatcgattttgacaattttcttcgtggtctatttaaatactgcacaaactatcacaattttgtctaataaaaaaacttacaatatttatcattgttttcttccagtttatccatatgtcatatgctttatctacatttaatctaattcgtccacgtgatgggctgtggtttttttttttcttacctaaagtcatagactcacaaatctatatttctatcaagatggatacatttatggtacgaatcacatgattttgatctttaattaaagtcttgttagttttccaatgccagatctcatcgcatcggtggctactcaaatccccacctattaataccaatttcaaccaaaacaattcccacatttaattattttcaggacctttaatttactaaaatttattattgctaaacctaccggatcgggtaaacggatatgcgattcgtcagccaaattcatataacaattataaaccatatgctctttttccatgcagatattaattgtatactgcaaaataatgattataaaaaacaaaatcatatagatccactataaagagttcactcgaccacattcacataacaaaacaaaatcatacatactccagaacaaaggaaaatttaaaatatatctccttatatactcctaaagttttctttcctttagcttcttgtttagttttattctttcaacattaacttttttttactctcttgtcaaaagagaaaaagagttcttgtaatggatgattcaagctttatggatttgatgatcgacactgacgagtatctgatcgatgactgggaatccgatttcccgatatgcggggaaactaacaccaaccccggttccgagtctggatctggaaccgggtttgagttgctagcagaaagaccaacgaagcaaatgaaaaccaacaacaacatgaattcaacatcttcttctccgtcgtcttcttcttcttctggttctcgcacgtcacaagtgatctcatttgggtctccagacacgaaaaccaacccggtcgagacatctttgaacttctccaaccaagtaagcatggatcagaaagtggggtcgaaaagaaaagattgtgttaacaatggaggaagaagagaaccacatctattgaaagaacatgttttggctgaacgaaaacgtcgacaaaagctcaacgagcgtttgattgctctctctgctcttcttcctggcctcaaaaaggtcaacatctataaaccatctctttctgattgtactttaactatttgtgtttggtttaatatttattatatagtatattcttttataaataacccaccagaaccgtaaatatatattcggaaaaagaaactcatttttctttaaatgtaaatgtaaactccaacctcaacaaacataagaaaatcttgttcttatttacattttgaaaatgaaaatctgttttttttcttaaacgttttttttctcgtaaaaatcgtgtttaatatgataggcttgtaatttgtttgtatgtggatgccactactcataaaatccggatggtgacacaatgttctctagtaaatattgtactaaatgttttttttttttttgtgtgtgtgtgtgtagacggacaaggcaacagttcttgaagatgccatcaaacatttgaaacaacttcaagagcgggtaaagaagctggaggaggagcgagtggtgaccaagaaaatggatcaatcaattatattggtgaagagatctcaagtgtatttagatgatgattcttcatcttattcttctacttgctctgctgcgtctcctctgtcttcttcttcggacgaagtttcgatcttcaaacaaacaatgcctatgatcgaagcccgagtttcagacagagatttgttgattagagtccattgtgagaagaacaaagggtgtatgattaagatcttaagttccttggagaagtttcgtcttgaagtagtcaatagcttcactttaccatttggaaattcaactctcgttataaccattctcactaaggtatgttatcaatcttctaatatttttttatttatcatattctatctttttttatatattatcatttactgttgatttttatgtattaatgtgatttttaaatctaatttgcagatggacaacaaattttctcgaccagttgaagaagtggtgaagaacataagagttgcgttagctgaataatattttaaaaaacgtttatgtgaatttcgcagtggttaaacgtgttagatttggtctccaattttgaccagatcactcggtttagttgaataatgagtagttggataataaaaccagatatatgcacgaaatatgggattttgtcgtttgttgagtgcaaaagctggattggtgtgtgtacctaattatggctgtatcattggttttgatactttgatatatatttttccccaatatcattgggttggttcaataatgaagtacctaagtgttcattaattttattggcttcatgttaattactttttgattatacttaatctgtaaatctttaactgagaacgagaaatctatgctaactatattgggacttcatgctgctataaacaaatttcattagaaattctttttgtgttcttataaaagttttgagttcagttgacctctatgggctcttataaatttttatttacttgtattttgaaataaaaatggttactatagttacaaatttgcttattgatctcagtgttcaagatttatattataaattgtgagatatgattttctcccattcccattttgattggtcgaccaaatgccttgtttttaaaggttatgtaagtattacttaacaatattttcgtcctaaatcttccacttttttttcaactacacattgattagagattcattttttgattggtagcccaatcaaaaagagaagagtttacataagaattatcagaacttaaagatttagaagtcttagctaaataatcaatttgaaaattacaagagcgaggaatattagaaaacgagaaaaaaaaacttaacttggagcgaaccaaactcatctaggattttgaaaaagcgggacatttctgatgagattgcaatatagagaaagtaattctacacaatctatttcgaaaacatgacaatttacattttttgagagaatattcttaatacaatcctccatttctttttacaatgaaaaattgaatcattgcttattttcaacattaatcacacattaattttaatcttattattttattttatacttatcttctatatcaatctttagtattgataaattttattaattgaaatttattttttatttttaaattttatataccttttcacattgtaaacagtgcttaattaatcaacgaatgagctgttaaaagaaaatgataaacaagattattttaaaatagatttaatactttaagaaatatatgtctagtattttcaaatatttaaaccaaattttctttcactaaacaaatttttttataagacctacaaatggtatctattttgtatacaaaatagacacaattgtgaccccactaagaaatagacatatagaaaagttaatacttgtagaatagtttgtctttttgctataaaaatattaaaatacaatagcgacccctttaaaaacagtggttagaggaggcactagttgtagttataaattttgaaacaatttattgtgtcttgcgagtgggctaaaaattaaaattcccccattagacagtgataggaaaaatatttaagacataagttgactaacaataaatgtcatttaaagaaaaaataatgggtggggaaatcgttaatttttaatcaacaaaattgtagtgatcttacttccatcggggattcttctagaaatatactgagaaatgttgacaggaaacaaattgagtgtaacgctccgaccatcaccgtatgtggtcttctatactatttctcagttcgtagacttcaacatcgtctgataacaattttaaaaagttgtttattgtctaaatatgtatcagaaattacttctaagcaagtcactcattctaaaagtgctccagctcaaatacgtttaattatagagttttaacacgatgtttaaccccaaaaataattaagtgtagtttagtaacattgataaataaaataattcttttaatctttctttatgtacaaccatatttctaaaattagggatgttacatttaggtttctttttttccttgctagaatgtaataatccataataataataatgatttagattctaatctttcaattataatatatacaagtggtcccatggtaaaaagaaaaaacatggaagcataaatcataaaagcaatttcagtccactactcaatattaacacaaaggctaatgaatttagacaaagtgatgacgatatcatatttaatttccaaatccattgttcgaaatgagagtgcgaaagctaagtggaaaaagccaaaattaccaaaactcttagcactagaaacctttcactggaggcccaagattgagccgtcaacttcacatttacgttcatcttgacattttaaaacggctgtcaatttccatcacgaaaaaagtgtgtatatgtgtattgaagtctcacttcgagtatgttttttttgttgttatgtgattctatcgagttagtattgtttgctattggcgcatacatctttgtggaccggagacaatagcaggctaattagtcattttccaacgtgtttcgaactggagacccggcacatgagctacaacctttaaccacgtgagtatcttgtgctggttggttatcgagttattgttaggttttggagtcttctaagatttatgtgaaaccagtatcattaaaagtgatagcaataaaaaaagatgaaacagatttacgtagcagtatattattatgatagtcttattaaacttggtttcttcttcctttttccccttcaaaattcaaatcaaagtctttgtaaatttgttacgtacaaactaaatattggagtataaattattatgtgaaagtgtggacatcggaaatttgtaatatgtttgcattacatgacctaagggctgagataatcaattataatatattgttcatgatcgtatcgtaacacccttttctataaataaaaaaaggttacgtacggcatacgacacttattaagctttgatataaataaaaatatttgaagagaaaccttagaaagtagtttacctaaactactacttctttaactatccaaacccacttgaagtaaacttaataaatatctcacaagatcatcttagtctaagagatcttaaactctcaaccaacatcttaaaacatcgtacagtaatagcataaccactaacacctaaatcctaagaacaaccgtagatagcctaaaagcgtaagaagttacttagatgaactcaaatgacaggtatgaggtatcccgaatgaccttgatcatcttttccgcgatgcaaacttatttacttcccaacaatagccttctaaagatgctctcatgagcaagaacaaaaagatgaaaaccaacaaaaaaaaaacacaccaagaagatgagaaaaaatgttgcaagattattgctctgttctcacttttatagcccaactacataaatcataaacgttcttgtatctaagaacaaagtggttcgatggaacgataaaacaatcgaagattttacctaaaggagatgagtttcttgaacctttaagattggatccaagaagaccgcaagagcttttattgtgaggcattattcttattccaaaactctgactattccaaaaccatcgcttaagtgtgtttattcacgatcgagtctctttatttcttcgcaaaggtaacacctttatgaatacttactgaaagctctttctttgccttctctaatcccatcctgatcaattagcaaaaagaaagggcggaaaaacgatatgaacatacaaacatgtcgaagtaaattcaagatgtcagatcgatcaagattttaacttttacctctcatattcgttcaatggtccaaggccgtacacttcatcgatcccacatcgtcccagacgcaccttcgatgcgaagaagggaagctcagtcacctgtatgaggaataagacaaagtccatatgttcatcttttagggttaagagatcttttatagatacaatattgtacagttgaattaaaggactgtacatgggatgccacatatgcgcactcaacgatgtttgcatcacctcgtagacccctgaggcaagcatctgcaaactccactgctgcatatgcctgtattttatcatttaacagattgagatatcaatcaaattcccagctttgtcatacaactcccatgttacaacaaaagacctaccatggatagtgttgcagaacctgctccagctttagcctgcaaaatgatttaaacggtaaatgcaccgcttaattcgaagttcaaaacaaagaaagctgaaagattagtttatacctcaacaacttcagtgccaccgttttggatgcggtctgtgagatattcaatctctttttgagtgaacgagcaaggaggtttcacctgtagccaacataatgatgagaatattatatctgcttcaaacaaacataatgatgagaatcatctgatctcaaacctgcgaaagcagtggtaaaatcgtaactcctgcgtgtcctccaacaaccggaacttcaacttcacggggatcaagactcattacttccgcctattcaaccccataaatgcaaagaagaagatagttgagttctaatggacaatactaaacaccattctaagaccaaataatgagtgcataccacaaaggtattagctctaacaacatcaagcatagtgacacccatgagtttctttggatcaaaggttccagctttcttgaaaacctcagctgcgattggcaccgtggagttcaccggattactgattatattcacaattgctttaggacaacatttagctatagcttcagagagtgtcctcacaatcccagcattaatgttaaacagatcatccctcgtcatccctggtttcctcggaacaccagcaggtatgatcactaaatccatacccgtaagtgcttcctctaactgcggctgcccgagaaatccacgaacctaaaacaaagttttccaaaaacattcacaacaatctctatatgatcttaacaacaacaatcatcactagtgctctacaacatctaaagtactagtttttaagctcatgtatatgatctttaagctcatttctctatttcaacaacaacaatcatcactattgatcaattttattagctctaaaacatctaaagtagtaattttggaatcgaaaaccggagaatttagaacttacaacggcactagtatccatatgactaatatcagcagtaacaccaggagcattagcaacatcatagagatgaagaaccgaaaccaaaggattcatcttcatcaacatcgcaagaggttgtccaattccaccagctgctccaagtatcgccactttgaatccgggtgatccaccttttgcccgacaagccacccgattcaaacctgacccgtcagcaatctaaatccaaatcatcgaaatcagatcaacccaaaaaaaaaagaatcaaacttcgatcaccaaattggtttaagaatcagagaattcaacgaaatttgaacctgattatgaagattaggaggattgagatgagcagagattctcgcgatacgttggtttggatccatggctgcttaaagctttgttctttaacaacgaaattgaggtctgattaagcgatcacggtgaagaatcggtaaaagggtacgaagagatttatataatagagagatagtgataaagatgacgtcaaaatggatccatgtattgggaagtgtggcaagagaacagagagagcttatctgtcgtttctccgaagtgtggaagacggtacgacatttccggtataaattccggtacagttcaagtcaaaccataccttttaaacttataattttattttaaaacaattttgttaaaatcttttactgcttaactacagtcaaattatgtgcattatgttcagaacggtacgatatttccggtataaattccagtacagttcaagtcaaaccataccttttaaacttataattttattctaaaacaattttgttaaaatcttttacagcttagctacagtcaaattatgtgcattatgttcaggacggtacgacatttccggtataaattccggtacagttcaagtcaaaccataccttttaaacttataattttattctaaaacaattttgttaaaatcttttactgcttagctacagtcaaattatgtgcattatgttcagaacggtacgatatttccggtataaattccggtacagtttaagtcaaaccataccttttaaacttataattttattctaaaacaattttgttaaaatcttttacagcttagctacagtcaaattatgtgcattatgttcaggacggtacgacatttccggtataaattccggtacagttcaagtcaaaccataccttttaaacttataattttattctaaaacaattttgttaaaatcttttacagcttagctacaatcaaattatatgcattatgttcaggacggtacgacatttccggtataaattccggtacagttcaagtcaaaccataccttttaaacttataattttattctaaaacaattttgttaaaatcttttactgcttagctacagtcaaattatgtgcattatgttcagaacggtacgatatttccggtataaattccggtacagttcaagtcaaaccataccttttaaacttataattttattctaaaacaattttgttaaaatcttttacagcttagctacagtcaaattatgtgcattatgttcaggacggtacgacatttccggtataaattccggtacagttcaagtcaaacaataccttttaaacttataattttattctaaaacaattttgttaaaatcttttactgcttagctacaatcaaattatgtgcattatgttcaggacggcccttaaatatgttgggccacaagctaacatttttaatgggcttataagctacttcaaaaaaaaaaaaaaaaaaaatagaagagggaaaaaattgggaaaaaataaatcttctcaattactctttgtcatttttccaatcaagaataatttgttcaccaacaatattcttctcaattttttttactttcagtaaaaacaactaaaaatttcctctcataaatacatggtatacaattttcttctacttttttcttctcgtttcttctcttttttttcttttcttttacatggtatacaaaccagtcacactcatagactctttcaaattctttcttattcacttaacttggttctaacactaagcttaggcatttacagtacaaagcttagaaaatataacttatagtattttttaagatattttacaaccacaattttattcgacccactcataaccataactttatttaacacactcttattcacatattaatttattgttttatcttgacatattttgtaccgggtacttgagtttcaattcggatacgagccgaaaaggaggtaaaagccaggtaacaagtaaatttgcccaatcttagtagatgtctcgtttttgcactcatgagtaaaatctctaaatttgggatagtcaaatatctagagccatatagtttcttcctacgatttaaatacaatttgttcatatatagtttcttagacgaggtttatgtaggaatggccttcgttcttgatgttggtagataaactctcatctcttttcttttaaagttctttgcttgttatatcctaaaaccgagtatctgacatgtataatattactcagttttggctagccaattgtcatgttgggtacctattttatcatttactgttgaagaaacaaaaaaaaacgatgtatagttctatttaagaatataagccaactctagctataacaccgtaagatccatcatccatgtctcttaaaattgaagtgcatgtactttgatcatattgagggcttttatgataatatttacgggggttttaacgtcataatataaaaaaggttgaggcgattcgtttataattgaaacaaataataaacctacaaaatctttctcggttttctccatcttaacgtcatatatttaatgtttgtcattgattttatacatccgagaatattctaatgacattacagaaatatttcaaaattacctcaacctttttttattgagctggtcgtttgttacacattttgacattatactgaccgatccaaacaattattttccaatgaattttactttctatctaatcaagagacaatcaaggtctttaattatacggggcatatccccatttctgctgcaaatgcgaaatcacagataaacataagacaaaaccaacccatgatactcaaaaccgacacattctgttttcaatgacatatattttggataccaaaagctaaacagatcgaatctctcaactaaaataatcaaataaaatccaaaaaggaagattaacttttaatcgcctgtcttaaaaatattaaaagttaatcgtctgtctaaaatcctacctaatcagtattttgaaacacaaaaggtttttcatcattctatattcttaaagcgaaatacgaacttagttttaccatcaaaacaattgtattttttgtttgaaatactcaaaatatttttatgaaaaactatttatttagattcaactctaatatctttatatcattttattaaaaaattatgagcatttataaaattaataacaattttgtttttggtaaatggcaagatcgagttcattgacatgtaaattatttttaaatcttatctttttttttttttggtagagttttaaatcttatctttgatatctaatctttattgtattagctttatctttaaacaattttttttgagaattctcttacaaaaaatattagcatgaaagaatggcaggtttaccttttctttacagattagctccacaatgtgagattttttaattaatacaaaagttgaacgaaataccaaaatatgtgagtcaatatgcgtaattgattgactcacattgcttgacattagtttatgaaatgtaattaatctattgattttagtccaagatttttcaaaatctatagtcatttgagtacttccttaattgttacatttcactaggattgctttccaaatattcaactttcagattcttacatcaatatgttgaaaaagctacaccagtaaaactagtttcatgggctaactgataaatctcacaatagattttagtttatatagtaaaatatatattttataaatcttttaaatgtgcacacaaaaaaatcttttaaatgtgaatttacagctaaatttttttaaaaacatttgctgtaatattcagaagtgtaattttaaattaaaacctagctagtaaagtaatagtctacacgattttaatttccttttatccacttcaacgtaatattaaaaattcgcaatgtttccattattacgtaactttctaaactcgtttcatataatttccaaaattggttcgtaaatcatatcaagaaattgatttgattctccactatatattattaataatctcttttgaccagttttagctaaaactataatactaagaagccaaagatgaatcatcgtctcgccggaataattagcccacttggccacattactacagatccaattcgttcctcctccgtgaacccttcgtctccggtttactacaaaaccattgttaaccatttcaaatctcaaaccggtaaccacgtttcacctgggcttaccaatcaagagatctcagccgttgaatcctctcatggtttctctttccctcttgatctccgttcgattctccaaaccggtcttccggttggtaccaattttcccaattggcgaaccgggtcgaaccggaataatcttcttctccctcttcttaatctgtctcaacacgtcgtcagaaatggattctgggtcgattcttgggggatccgacccggaaatgacgcggaggctttgtcactcgtgaagaaattgattgagatcgctccggtactcgtccctgtatacggcgatttttacgtcccttcgacgacgccaaatttggcgggaaatccagttttccaaatcgacggcgacggagttagggaattgagttgcgacgtagtcggatttctcaagggaatcggtcgatcagaaacgccgacggaggatcgacgacgaaggagacgaccacggagagtggagttttggagcgatgtggcggagggatggagatttgtggtggcgcgtgattacacgcgcgattggtggagcgcgttaggttttgaggggttaacggcgtgtttggacgacgcgttttggaagctgagggaagcaggatggacggaagatgatgttcgcgatatgatgatgatggacagcgtagatcaaaacacgtgtatccagcagcaaacgcaaacgcaatcgcgggatgtggtgtacgcgtttggcgatgagggaatgaacgaaagagatagagacacgtgtacagaggacgaggatcatcagaaaggcgaagtaacgacgttgaggcatttgttgctttatgatcgtttgatgagctaaatattcatctagttgggatattatagttcttgtaaattggtaaattgtgttagatgaaaattattttctcgatacttttttttcatgacattttgtttcgtggatttaggagattgatattgagtatgattatcataaatctttttctatcatatactagtaaaaattctggatttttgaatatttttttggctatattatatgctgcaatgttatcgatcttaaagcagaagttgtttaacaaaaatctttattttcatgagataatgaagtttcaagaatttgtttaaagacaaaaaatcatgtgttcggtacaaaagaaaagctataacttatgctctgggaatgacaacaacccttaatatgttcaaaaaaaaagattacaacaaattacaatgacacaaattgaattcgtaaaactctctactaaacaacatcgaatgagagaatttgagcaaccattgtaagatttactcagccgcaacactctcattgctccctccatttccagaatccggtaaagtttcaagatcggtgcgaacatctttgacttcttgaggaagattagtatccgaagaagaatcagattgttcttgagttacctctgtttcaccattcttgttgctttcctccttctctgatgtttcctctgattgcttttgttcagtatctgaaacgctattttctttgctagattcacttgtgtcttcgtcagtcttcttctcgttttcctcaacctgttctttcttctcactctcggtgtttacattttcctgtgattcgttggacgatgactcttctttctcttttgtctcggtttctttctctttagtttcctcttgcgatgcagactcttctttttcaatcttctcgttttctttctctttagtttcctcttgcggtgcagactcttctttctcaatcttctcgttttctttctctttagtttcctcttgagaagaagactcttctttctcctttgtctcagtttcattttctttagattcttcttgcgatgaagcctcttctttctcaatcttctcattctctttgtctttagtttcctcttgagacgaagactcttcgttatcctttgtctcggtttccttttcttcggttttctcttgggaagaagactcttctttctcctttgtctcgtcttctttttctttagtttcctctaggaacgaagactctattttctcagtttccttgtcttcgtttttctcttgagaagaagactctactttctcctttgcttcggtttctttgtccatagtttcctcttgcgatgaagactcttctttctcctttgtctcagtttctctgtctttactttcctcttgagacgaagattcttccttatcctttgtctcactttccttgcctttactctcctcttgagatgacacttcagaagtttcttgagaacctccgtctccagaacccgtggatttaccggtcacagaggactcaccgttagaatcattgaactccttctccaacaactcattcttctccatagattcaccctcagattttattccctccaaggaatccgattcatgacctgaagacgaaccagtactcttctcatcactactgctttccccattatctgttgtgttaggcaaaacactcttgataacagaatcttccacttcttcagtctttatacccgacttgtcttccactttctcactgttctccgactcactagtcttctcctcagactcatgaactacctcactagaagcatcatctcccttgtaattattctctcttgcctcttcaatattcgctttctcatctatatctttctctttactctcctcgctctcgtctatacctctgttttctttcttctcttcaacctcactctcttcgctactaccattgtctttcttctcttcaacctcactctcttcggtaccactcttctccctactctcttcagtaccgccattgtctttcttctcttcaacctcactctcttcactaccactcttctcgttctcttcggtaccgccattttctttcctctcctcaacctcactctcttcggtaccactcttctcattctcttcagtaccaccattgtctttcctctcctcaacctcactttcctctgtcccactcttctcattctcttcagtaccgccattgtctttcctctcctcaacctcactttcctctgtcccactcttctcattctcttccgtaccaccgccattatccctcttctcttcaacctcactctcctctacaccgccactgtctttcttctcctcaatctcactattcgaatcctcattagacacaatcccttcactttccttctccttattctcttcacctccttcaacaatctcattctccttatcatcaccattacccgaattaaaactctcaacaacattcttacttccttcatcctcagcttcatctacctcaacaacacgagggataagatctttcctaccaagcttgacaactttatcaacaccaccaacaacaatctttgcactttcctcaaactgagctttcttctcatgagaatgcttaacttgataaagcaaccatatcccaacactaagcaacaaagtcaattgaatacaatgcttcaccttgaaaccctttgatctctgtcctcttctcggtgatgatctaaacatatttcctcaatacctattccaacaaattaatcaatacccaattctcagatctcaataccaaattccatcagataaagaacattacattaaatgcacaatgattgggaaacagatctaagcaaataatacataaaaataggaactttaccaggaaaggcaaatcaagagagcttttttatttctgggaaaacagaaagatgaacaatttttgcaaaaaggaacgattttgagttttgggatctagagagagagagagaagtgttcccgttaaactgccattaaaatcgtgcgtcccttcaattggaatcaaagcaaattgcagagaaaaattagttttttaaattaagagagagcttaacacttggaagatgacatgtgaatctgtttaaacgtcgtcgttattaagacaccgacagtttgtaacgacgtcgtatcgtatcctctaaggaatggttattatgggcctatcagaaaacattaagtcaactatggatccatcaatcatcttttaggtcaataactatgggttcattcaaaatttcattaaaaatgttttatttaagttagaaacttagaattttaagaacaacaaaaataggtaaaagttattacttattaatttaatatttgtaataagttatttgacaaaaaaaataaacaacaaatccaaggacatttggattcatgattttataaaatttatattggtagtgtgagcttgcttaaacatctctgtttttttttcctatgtgaactcgtacaactaaaagtgatattgatgatcaatcaaagataagtaataatcctaatcattattaatccatcactgcaagattagcagcaaacgtttcaacggcacagtcctgtgattttcaaacagaagataaaagctagaggactgcaaaccaaaacacttgtcttgatctgaaacttcttgttataatgtggtcaattagtctattgaggagttttacaaaaatatatatgttaagaacattacgcttcttgttaataaggattcatttggtctaagatcttgaactatcatttgccaaacatgctttcggtaaactgttgataaacacagacccatgcaaatccataaaaatggcgtcgaacaaatctttaacactctgcttcactcccacaagatcactgtcagaactgtagaggaaatgtttctcggatctccctttgctccctttgtttgtcttaaaaaccagtaacaccaagtgtaaagattctcggaataatctgaacaatgtggagtagaaatgtttgtaaaaagtattgtcacattaagctaagtcatttccaagaagctctgaaaagcaaatttgggatatgaaagtcctaaagtttatcaccagcaaatatatcaacaacgcagccttgtaatgccaaaacagaggaatgaagcacaagatccttcatttttcgaccacctttggcccttatcattcatgagagatagagtcatgaaatttgacttgcattacacgttcagctgatcaaagatatatactaattttgtactgttccgcaagctagaaatgaaacaaattaaatttaagttcattaggcttcgtcagcgcgctatgtatcatcctcaaatccatcttcatatctcacagacaagctatacatatctaaaatattcaataagcgtcgagactctgtaatctattttcttgttgaagtaacctacatacataggaacaagtgaaggttgcagggttgtctgctttatataaaaactaaaatccgtttagtgaatctcttagctaacacatttataattcttataatatagtgaaaaagatagtccaaaaatcaaaatagaacttgtaaatatccaataagttgcattgaagttttaatatggttgctcttgaatttgtgttactgactagttgaagagagctcgactcgatcctcaggctgctaaattttttttggttgtgatgtaaaagattatttggattgctaaattttctgcagtctaaggagatgagacattgatcaaacgaagattaaatgttagaatatttgattagaatcgttatgaatttggttctctacttaatagtatttgtctattttggaaatcgattcgaatatttatttgcataatgacatgaccaattaatttatatattggtctgtcatcgcgtacaaagcagctggtctaatttgatattaaatccatgagtgttttcaataaagcaaacgactaataatatttctaagtgaaccatataaaatatagaccagttgttttttagttcgccgttgtgctataccaaatctaagcttggtgatcaaatattattcctgttctttgaaaaaacgttcgaaacaagaagtcgacaaaccgacaattgaactagcaattgacacatgtattatgctgttctaaataagctaatttgcgtacgtgcacacgtaaacgaattctatcaatcattaatagggattatttaatcaccaacacaataattactagcgttaccaatcacttaaaataaatgtaatctaatgatattagtacacatatataggactaggagacggtgtaatcgttgctgaacctgacccggtggtagtttttttttggtatgttgtggaccatggaccggccctatggtctatttcctcatacaacgattggtaatttaagggttaacatatatatatatatatatacaaaattatgatcacttcaacgtttttttttgtcatgttaaatacatggaaaatagaagataaatattttttaccttttctaatgcgaagttcaaatagacttaacctatgcaaagtatgaagttagttacttttagtaaatcaacataaaataacatcaattttgtgtaaagaaattttgacataaattttctgcatatatcccagaagtttaataaactaggtagctgcgtagatatctcactatcaagctctagggccaaccggccaagtatggagttgcatgtgacatatgatgatgtacgtagaccgtagtgaaattgaaggattcatcaatataaatattatcatgtatagaataaatgtaggtactatatgaaaaacagaaaatgcatatacataacctttttttccatagcatatatatatatatatatatatatatataaaactcaatatcttcataagatggtacgtgagaaaatttcgaagagaaaatcacgtgaagcatgtcccaccttaacaccattaagatagagcatcttgcaacttcttgcgacttcacggtacttctcttctaaatttaatgctcgttatttcattcttattatgtgtgtttattgaatattggtgttattgtaaatatcatttttcttttttcaacagcaatataatacagtatgggactattattgattttactattttcatcaaatcttttgaatttatcatctttattaaaatcttacgaatttatcatttttaacacttaaaaatatatatatttagatatataactacaaccgctaagctcatacacaacaaataaaacgtatgttaaatcacatttctgtgaaaatagtaaaattcgcaaactattaaaaaaaggacaaatacacaaatctcttccataaattagcaaatccataattgtttcatataatatctttatttgttaatcaactcctttttgtcgttttcaatttatatatgcattattttgaaatggtaatcgactaataacataccaaggatgatagtacaaatcattataagctctgattctttgttactagctttatattgttaattagtttattagcaatttagcatcatgcttttttattgttataaaactcggcgacttgtaagacgagtaggttactcaacaaacaaaacttctcgaaaatctatattcagatgaataactcaaaccctaattaattattctctgttcacagtttctggattttatatattttagccgacggaccctaactacaatgactaaaatattgctcatatttactcctttttgttagaatatttattctattattgtgaccattaaatctttttataaaaggtatatattgagtacacacaataaagtattagaaaggttagtactattcatcttgttgttcgtgtgatctttgtatttatatattttttaaaaacaaaactcttgctaattataaaaatttcattaaaagtgatgcatcaatacacgtgagctaacctccaaaccccacaccctttttctctctcgcttaaaatccttcacacccaatttccatttttttgtttgaattttccctttggataatccataagtataatattttgagtaaaagaattactatcacatcaaattaatgcttctgattacacaactcaattttggatttactcaaaagagaaaagtttggtgctactaaaattataaacccttttaaaagttgtggctttcccatctgcttagtattcccatataactttttatttattggtgggaaaacatagtttccatcaatttttctttccgtttttggattcaagagttcaaatacaaatcaagttgataccactgccttgtttagatgaatgatgaatctaatataaaagaactttgtttgttatgatatagtcttaattatcagatgttttcacatgatataatataagattctttctttttgtagcaataatccaatgaaccttatacaagcttgaaatgtcatataatataataggaaagatcaaacgaaaactgcattagatgtttaatgtgatgtaaaacatgacctaccattatattacatagatgtcgtattttagcgtataaagttttaacttttagattgagatttgtaatttagtattcttgtagcttatcaccaccacatccattgagtcccatttaaatatgatattatacgttatatattttatctttttatttttttatgaacaatacagccccttaagatctaaacacaaaatgatgaaagtaatcatcggctgatcattagtatgcatgaaaaattcccatgtataattatattgttaaatagtttttcatttattacaaacatgatttacttgactaaaattgaaggtgagaaaataagatgtataaattaaagtgaagactattttacctttttctacaaataaaataataattacaaactattctttttctcaaaccagcaatcccactgaaaaacaaagtgggaattgtagaagagaccatctatacgcatcttaccctttctaacatagtttttgtgttcttcctactagttaaaatgccacccaaaaaaaaaagaaaattaatattttaagtaataaaattaaacgaattactactattcaacaagctgcagatgggttagtaaaagggttgaagaagtgaggctttgaggagatagagaaagctcctttggccgtacttccatctacaatcaccgcggtagccccgctgccgccacctcctcctccattacccccgccgccgccgccgattctctcacaagaaggacacttcgttagagtcgatgcaggcatgtgcatgtaaaagggctgagtcaattttagggttttgagttcttgaatctctttctgaagtcttatgttctcatctgctaatgtttcacaacacttcttcaaaaactcacaatctacttctgtttgcttcagctttgtcctgctcattcattaaataaaataaataattaaatatatataaccgaaagaaaaatcatatcacctaaaaaatagaaaatattttcacctacaaaattttctgactattaaagaaattttgacacatgaaaaaatcaaatattctgataatttataatataattttttttacctggctcttctattttgaaaccatacttcaacttgtctaggccttagattcagctgtctagccagaacttgcttttgtttctgtaaataaaatataacaacaaagaatctgattggataagaattatcaaaagtgattagtaacgtataataaaaaagaattaggattaaggatatgtagttacgggattaagggtgctatgatccttgaagctttcctcaagaagagcagattgttgtttcgtaagcctaagtttttttctagcactaataccttcttcatcttcatggtaatcacttataactctctccgtcatctcttcctcctccggcgactcttcgccaccgtctctctctcttttcaccaccctcccgcttgagaaagaagagactccgctgtgagatgacgtctgacggcatagctggtcagctccggtcaccacggtaaccgagggatcgcccgagaggcatagagtcaacgacggctcgagcttgtaaacggaggattgtctgatggtactattgtaattatttggaattggtgagggacctaatccaagaacaagacctgtgttgcatgtatcatcaaaacccatctgagtcgaaatgaaaaaaatatgcctttaaaatttatctatctttgagatttcgagaggaaaaggaaatgagtttagaagataatgggaggagatgaagccaatggggcttcttaagaaggagaagaaaagtattttttttattttatatttttaagaaattgatgggtgggtggatggctaatagttattaatcaaaggaatgatttatattattttaaagaaatgattttattttcttggtaattcttttcctgaaagaaaaaaaaaataatgtgggaaattatgatggcacaattctctctacttttatttttcttacttgcaaaggttgaccaaatgagcatctcacttggcacttgctactattcttcccactaataagagaaaagttcccgaaaaagttcaatgattttatatttggtagaagatggaattatcgtatcatgaatataaattaaatattatatttaaagctttctccattctttttctggtatcattgggttcagtcggcatcggtattttagatttttatatcatgaatatttttatcatgaagcgtacgttattgtagacaaaaaaaaaaaaaagagacgaaattagtatgaatagtaattagaaagtgattaagaggtgcctttaaataacggaccacaagacagttttacttttacccactaattttcagcctccttttccttatcatagaaacacattggcccttgatgttttattcatttatttaattatgtattatatattttagttattttttttcttcgtatacatatggatagtgatccccaccatcttgtttaggtttggttctcttgatgtcattcaccaattaatttagtactttttggaaagagttaggcttaggcatatactttattttcgaaattttttaaacaaggtgattcatccgtaccaataactcgttacatccataattagtctcgagctttaactcacagttatctatatagattacaaagtatttcctagagttttataatatatcatatcgcgctttctctttcaagataaactgatgtaccaataaaacatataagagaaaaaaggaagtaaaatcattttgaaactaaagtgtacgaatatatttatatattagggtaaaatactaaaataagaacaactatatatataaatgtcactataccatgataacaaatgttactgatttataccatgcatggtgttaaaagccggaattcaaactattatattttgagcagtcattacatcacaaattaagactcggtcaagctatatcgctagatataatcaaaagtcttaagtccgtagttaggtttattttacccgatttttattcaaattgcaatatgtggtcgaaacagttgtaaaaaatgggtgctcaccttttaaatcactttttgtttggttacctgacgtaacattagaattatcaagagaacacacaaaggagaagtacaataaaagtgggtagaaactaaaaaaatgatatgggtgaatacgattcgtcaacaataacctaaaatctttggagtaatggattaagaaagtttatgtgtaacgtttcattaggtttggtctcagctttgttatttgttttggcacttcccaataatgaatttgtcggctatactcgtccaagtaaagtttttttttttttttgtcgaccgtccaagtaaagttaggttacccatcttatacatattattattatcattatttttaatccttaattattttttcatttataatctactcttatatatatatatgtatatatatatatatctttcttattttttaattaatgcattttcttaacgaaattctgttttaccccctaattctgctagtagcacacacacgatattaatgcttcaatcaatgaaaaataccaattataacttaatgtgatttttcagttcatatcattgtataacatttgactttttctaggtacgacgagttatcaatatgctaggaaattaagaatgatgaaagttcgtggataatcttatattaattataaattgatttttttttgaggaatattaattaaattgataaaaagtagaatagttcatcaattttaactataaactttaatatggtgtcgcaccgtggaattggtgctcattgctacttgattagactatttttctaatagaatattagtataatctgactttgacattgtgcaaatattcatgaatttagctcacattatgtatataatatagaaatatatatttgtatttgtcaacaatattttattttcttgtaagccagaagaattcaaaccaaagtccaaaactcaaaatagttcttcaaacatgtaaacaactttctgaattttgcggtctattttgttcttaaaactaaaacatttatttatatcttatatggtggtgcatatggaaaatttaaattaattagttatgtcactaattatttctgttattttgatggaccagtttacgtacgcgtgtaaataaatatgtccgataaagaaaaaaataacgagtgacttattgaaaaatagtttctttttttttttaactatggaaaaatagtttattaattagtatcatatgaatgaagataaatacgaaaaagaaaactttcaaacatgcatgtatgattgcatagtaatattaaattagtaagaaactatcaagtgctaataaatctggtttctcattatgaagggttggtccctggccgccagaccagtctcgggaggagaaggtgtggcaaacttgtttccacgacgacacatacattgtttatcataaattaatctttttcaattacatttaattaattaatcaaaatcctaatgttgaacttaggtgttaaacttaaaaaaaaaattcttgaaccaatcatttgatattttaatttcatgaataagacgacaaaaattggctcggaccaatattatttgcaaatgatttaggcgatgttccaaataaaccagacgccaaatttagtttgtttttattttatttttaatattgttttttataatatataaacggtagctcatattttactccaccatcaaatttaaacgatataagctgatgaataaatatagtatattcaagatatgtactagctagatatatctatgtcttttgatcatctataatattcaccaggagatttaccgattttccaacgaattatctaagacatacaattttttaattagaagtacatagaccatgacaatatatagatcaaatcaaatcatgatctgcaatatttacataataatatgaaatatgaatcacctatttatactagaagaaagtttttggaaaacatatcctttatatactaattgagaaacactcttgataaaaaatattatctctacatataaattatacggtataattaattacaatgttgatgtgtcacactcatagaaattctcaagaaatttaattaattagatgacatatatgtaatattggtcatacttaattttacatatttattttcaacaattaaagtttcatattctcaaagggaattaattaacaagagtatatatatatatatattgatgaaataagtgataaaatataccacacaaaaagaaacctagaattatagataaaatattattagtgtcaaattttagtagcaaaaacaaataaatgaaaaaattgttgtcagaaaacaccaataacacgataaattacttactaaatttgagcgaaaacaagaatgaaatagactatcttttaaatcttttttctattatctttagagtttggactggtaatgatacccaacacaacattttttcgtcggcatgaatacatgaacaatattattagaaaaacattgactttggagaaaagctaggtaacaataaagtaataaggatgtttttttagataaacaaacccataacataatgaagttgacccacaaccacaagtcgcatttttttcagatagttcagatgattggtaacaattaaattaaaaaccacatctttcttttttttcgaacagccatcaaacctcatccgctacaacaataacgaagactaaacaattaaaatcataacaaataacagattaattatagaaggaaaaatggaatgttcattaacactaactcttacgctggatcaaagattatatttaatttcaatgattagaggtttccgatccgacgtaatttagttttggtgacaagagtaaaaagaaaactcttaggtcgttttgtttagcttgtactaatctaaactaaatttctttgattttaattatgtaatcaatctaaaaattttcggtttggatcacattaatatattattatttgaaaaacaaaataaagaaacagagaaagtggtggttcacatgtcatcaacgataagcacatgatacatccatgaaatcatgtcatcaacaatacgcacatccatgaaatcatgtcatccctcacaaacatcttatccacacgacacgagagaagggaagcagttccaaaacagtatctttgtcagttatattcgacacgtgtcagatttagacagatccaaacatttaggtcccaccaatgatttgctataatggagtctctctggttatgattctaccatagatgtaataaatcatgataatgacgactttgatgacaattaagccactcattttcagactttaatatgttagtttcatctgatcaaaataaaataaaatatgttagtttcacactatcgtccgcgtgaccgttttgcgacaacaaatttgcgactacttaaaatagtttcaaattagtatcaaaggtcgagtttgcaactattctatgaatatttcggtagtcataaaattcttgtaatctatcctcgaaaactttaagggaatttctctggagatttcaaggaaaaggagctgtgtttaatggtacaatttcatgtgaatcaacccattgctccgtaaaaaaagtaatttagagatcatgatgttacagttgcagaagtttgcttattagctttggtctccaagcatatatggatcacaagttgaattatcctatctatcctttctctgctttgtggaatgccccttattttcatgttttaaatttatagatcttggatttcttctactttgtacttgtaaccagtttgctcggatgaatgaatgaaatcttgtttgcacaaaaatataaaaaaatacatatatatattttagtcttgttgttgtgatgggtcagtcttaaacaagagaccacaagtgaaatctagccctcaatcagccgagcaaaaacttatgctttcatgtagtggagatggctgcgagttatgaaaaacttctcatcttgggaaggtattttatgaattatgtgggagcctatattgatatgcatgagaagaggagaaaccatgaaccagaatagaagagcttgccccacccatgagtaaatatttcatagtagcctcattagatcgtacatctttcttggtatatctagataataggtaggagtataaattgaaacattttggagctacaaagatagttattagatcgttaggaagaatgtgttctacgaagtgatcccatgtccctacttacaaacctcaagtgatgttaaggaagacgaagggaaaatagaggtatgtatgaagactaagaggatagctggtctaaagaaccttccttaccaatatcgccaagctagagaaaccaaggttggttggtgctttgaactatgtctcttgctctctctttcacccattcagacggtgaattgtagagctactaaaaacgtttttcgagtctcctagagtggcgcattgaacattagaaaataatggtgcttatgagtcaaaagaaggcgtagaagcctacgaaccgtaaggatcggggtgtgaccatgtgtaattctcaaactaatatatacctaacaatcaataaccgtcatcatcagtaaaatatgttttctaatgttaatttatctattatctacatatagctgcagatttgaaatatactaatcaaaattaaataaacaattaggaaataataggaaaaatatgtggttcatcaaaagtttctattttacttttagtttctaactaatttataggcatttttcatggatgacgtttatatttttagacaaagcaattctttatacagcaattatatgatgcatactatatattgctaaaaaaaaagttacaataaatgaaaatggctaaatctgcaaatgagattggtttcatcacttgcctggtagttttcttagtgttaacaggtatacattctgaaaacaactctccgtgtttgaatttctaatttgtgcacaagaaattctaaccagtgcatattattttcaaataaactcacaacctttaacatattatacgtaactcaataactaattgtaactgccaaacacaagaaaaaaacttttctggcatttggaattgcataaaaaaaaactttattttaataaacaaaaatgctctctttttcaaaaatttaattggatatatacattttttaattttatatataatattctgttgtaaacataaaaatcaacaatcaaaccaaaatatttaatgaattatataaatatatatatatatatatatatatatatatgtaatatctttctatcaagttataattaagacaatatatgcattttttaatcaagagtatttgaataattcttacatattgattaataatgttataggacaatcgaatggaatgtcgaatggaatgcctcggacggtgccatgcatagaaggtcgaatcttatggaataggactcttccttgtagttccatactgtgtggagatcattgcgttccacacggttatagagccggcacatgtgacattgtcaacgatagggcaatatgcaaatgttctcgttgcagatgatccgactcctacgaagaatactattatttcctattatcatccatcaataattaaaatgtcaaaacgactttgtaataatgtgcaacaatatctatcattataatcatccaataataattaaaagtcaaaaagtcaaaaaaaacttagtagtaacgtgtttctaggataaaattacaaattgaattctaaaataacactgtctagtaatcacctttttcccgctaaaatataaaaatcatacataaagtgaaattaaagactttacaaagagaaaaaatctacaattgagcaatcttgacaaaaaaaaaaggacaaaaaaaaagttacaatacattagtaaacggaatgatatgagaaaggttaaagaatccagagcaccattagcgcacgccaatgccttctaagccttctcgaagagatgaagtttcacaggtcacgatccaccattttgaaatggatacgggagcaagccttagggaattatggaggacattattttgctgacgccacatgttatacacttaccagtttgaaagtattgataaaacgatgatgaagagaaatctctttattgaatatttcagcttaaggtttacaatgacagagaagggtttatatatgaaccccaaaatagtgagacaataggtcacacgtcattagctacacatcacaacagaggaacaaagaggatgaaatttgttatgaagggacagttgatgagctgtgaatcccgtacgttgatgcgctgaaaattgaggaatcttgttaccgttgcaaggtagagaagatttgaggttaatgggcttgacactttgactgaggcccaaagtattgttgagtgttgcaggtccattcgcaaaaagcaaagcttctgattgtagaggaggttctctctgattcacacaattgagctacaacttttctaagcagagaaggagcggaggaagaggatcgtgaggtccaagaaagcaattctgcccaagaccaaaccaacttctgtcgagagcacaacctgtggaaaaccatacgttaaacgcgtaggcaagcgatttaggtgacttatccacatgttaaacgcgtgcttaggaactgcgccttagaaccaaaccgaagcagtccacaatttttgagtgcttctcggtctaagcgcttcccaagtcttggctgcagaaaaaccatgacaaacaacatcatcaatgcaccacaagtaagagttcttagccaaatcaaaagacggggtaggtaaggtactaagatgatcaagaatggctaaagccggaacaaatcttgacaaagggagtcaccatccattctcgataagcatcagcgacacttgagtggattggaattcttagaagcctagaaccaaagtcgcccatatatacacttaatcaacggaccaagagaagactagctgtcaaaccaaaaggaaggtttaagatacccaatatctaaatctcttagagatcacctacataaactacttaataatttctcttaatccaaactctcaacattgccattaacaaaaattgaaattctatttcaatgttatcgttaaatgaaattgcaattgtaattgcacttaatttatccggggttttcgatctttcttgattgtttaacaaaacttttatatttgtctttgattgcccatgcctttattttttcagtgaattttcaaacgctttaagccaacttgatgaatttatttgttgccaacttaaccaaccttataagttataagtttgggtataaaagcatattatgtgaattgtttggttgttttggttgtttttctatctggccaccatcagtaataatattttttaaaatatatatatgttaatattatctaatattttcatattttgaaatatactaatcaaaattaactaaaaataggaaataataggaaaaatatgtgatccatcaaaaacaatttttttttttagtttctaactaatttataggcatttttcatggatatcctatttttttaggaaaaagaaattctttatatacaacaactatatgatgcttacatgcatgtatataactggaaaagacaaacaagttacagatgaaaatggctaaagctgcagctacgaatgattttggtttcatcacttgcttggtgattttcttggtgttagcaggtatacaatatgatgttcgaaccttgccaaagtgagattttgttggttgtgttttaatttctaactagtgcatattatttcaaataaaatcataattgtgaatatcttttacgtaactcaataactaattgtaaattcaaaacacaagaaaaaaaaaactttctgtgcgtttagaatttgcataaaagctttgaaattttttgttaaaaaaaaacaaaaattgttgacaaaaaaaataaaattgctccgtttttcaaaattttaatttaatatttttttaaatatttctatatatataattcacttttaatcataaaaccaaagtgatttttgaaagatattatatatatatacgatcagtttattttttgaaaatatcttataattaagagaaatatattgtcaagaagccttagtagttgtaaaggttttcttgttgatatcattcgatggcaaagtgccttatattatacacaagctaagtatctaattgacctaatacaataaactgactcatatatgtcgttcatatatgttgacatactcatatatatatatatgcatttttaattaaaagtatttgaataattcttacatattgattaataatattataggaatatcaaatggaatgagaatgactcagaaggtgtcgtgtatagaaggtcgaaccttatgggcgaggcctcctaagtttttttattgtagttctactctatgtgaagataattgcattaatactggtgcttatagaggcggcacatgtgacatggaggacgaagtggcaatatgcagatgtcatcgttgtaaaaagataatatagttatttatttatcatcaataactaaaaagcgaaaacgactttgtaataacatgcaacaatatctttaactattatcatcctttttttttttttgttaaagggtttaactattatcatccattaataataaacattcaaaaagacttagctgtttttttattttggtaatgtacaaagggtggaattcccctggatttattaaaataaaaataaaaacatagtacaaaccaatctgttgtggatacgcaattccaacgacatcatctctcaattgtgaatcaacaacaataacaaaaaaaagaacaacaacagaatgaacaaaaacaaaagcgtgaaaacctagaaattttgaaatccatcaattttagacttacatgtagtaacgtgtttctcgctttctaggataaaatatctttaaactgacgatatttttggccttcctgacatggacggaactatgttggtgaagatgttgtgttgattgagttttagaagctatctaaatatgtcatgagattgctgctgatacaagaagtgatgtgataaatgagacagagaaacatagatggaatcgtcatagatgtctcattgatggtgtaacagttcatacaaagtcattgggcagaactaacaaaagtaatgaagtattgcttgatgcagatgctagtaaagcaaaacaaaagtagtacttcgtgaaagtgctaacaaaatgattaacaaaatgcagaaaatatgttgtattaaataaaaaaatcgcatccaaatatttcggaggatgtatcagacgtctgaagcagttcttgtactagttccgacattattctattttttttttttaataccaagaagttttttttaatacaggaaatagtacatgaagctgagttgtgtgacttcttcgagagttggagtacaaaagtttgggaccgacttggacaaggaagagaaaccaaatccaaaaaatacttggactaagagcaaatccagtgattaatttctaagtaaagtttttatatatttttttattgataaatttggatagttttgtattttagagattttttagagtttttgaaaattttatggttcattggtggaatctttaagtgggtttttaaaacaaaaaaatttgaaaaagggaaaaactgaatctacatgagaataactgttgctggataagcttaaaggaagagaaaacatttttaatcattgtttgcatatgccattggcttcacatccgggtaaggatgtataatcaacaatatcagaaaattagaagagttttagagagaagccaagaaactcttatatgagtatggttcgaagaatggaattggtgaaccaagtcgtcgatgatttggctcttctctcccgatttcatgttcgatacaccggagatcaaatcgattcgaatcgccggccgtcggacaaaacaaaaaagtgaaaaacgagaggaaaaaggaaaacatgagtgttgtgattttttttgttttccgacgactcacagtcgaccacgtcgccgtctaaaaacccatccaaaaaacctaatattgggatggatcctaattatttagttgggttttcatttaattttggacttttaattagctagaaacccattagaaacccattaaaaactgccgatggacttgctctaagaagtcttcaacggttttctaaaatctaggatcagagtaagcacgttgcatttccatttttttacactctctctcgtgataaaaaaaattacagaatcacttgcaatgtgtgggaaacaaaaaaaaagaacttcaaaacaaaaaccggactatcgttcctcagcctcacggtcgtgaaacgatagtcggaaaacccagttagagacatttgacatcgtcttcttcctcgaaccgtttagtctttcgcttttactcttttggcatcttctacttgagttttcatcatcaaccaacatcttcaatctctttaaagcaagctttaatgtctcatcaatcatgttcgcgaaacaaactctaaaccaacccggttcttcacaatggcacgacgaaccaggagagatgttgagcttcacttcgtaaacaatcttcttccaaagatccatttccgcttcgaacgttttagatctaaggagaggtctcatgtcgacccaacaaaagagtcccgcattactcttcagacatttgatcccgatggcctctagacccaacacgagctttctctgtctgttcttgagccgtttttggttctctctaaggtagttcttagtgaacttcttgtcagataataatgaggatagtaggtattgtgtctgggaggagacaaggccgaaacttgacatttttgtagcggcagagatgacatctttgtcattggagtaaatggctccaactctaaaaccagggaggcctagatctttagataagctacaaacaatgtggactcggttcaaaacatcggtgttttcgagttgattattttttagaatctccatgacgctgatgaattctgaagagttgaatactgtgcccgaatatatctcgtcacttactaaatgtatattcttattcttggtgatgaaatcaaatagaatgttgagttcggtttgggttgttgtcgtacccaaagggttagatgggttggtgatgagtattcctttgacgtttaggtcaagcttcttggcttgctcgtaggcttcttcgagtgcaagtttcgttatgcgaaacccgttagtacttgagctttggattggtacaatctcaaccccggttcgccattttagatccctatcaaacctgaagtacaaaaataaacatgagttttagttaagtcaagttcgtaggaatgatggaaattttacgtgtaagcaaacagtggactaaccctggataatatggcgtgggaagcaagaaagcgtcaccgggatctgcaagacaaaacattagagtctcgtttgcggaagtggctccagcagtgagcacaaggttgtttgaatcaaaagaaactcgatttcctctattttctgacatgaaatcagcaaaggcctgaaaatcattcgagcaagatcagcaacctacaaataaatttgataaatacaattaataatcttacatttttgaaggaagagaggccatggtagtcttgaaagagagcgagttcccggaaaacagactggccatctctcttgaaacaggctgcgtctgtgttttgtgcaagccatgactctagtagatcaaagcatagctacagaaatccaataaaattaaacatactttaaattagtctctctgtcatgatatacataagtatatatatatcacatgctgttgaataatatttgtttacctgattttccgcaagacccatctggataatgccttgagggttcttggtaacgtcgtaaggattcttctcgtactcttcccaaccaaggaaatacgaagagacttggccatggctgttgcatgtagcttttcttgacaattgaaccatttcttttgttcttgtttttttttttttaataaaaggctcaacaataaattgaaaactctagaactagagaaagagttgtcagacaggctgagagagatcgagcgcgttgttgttgataagctacgagaagtctaagaatgaatgcatgtttattatatagtttcatgctacgccaaaatacacaaaggacggggattctaattattttcattatccgatttaccaacatgggttttcttttgattgttttttgttttagtgatttatttttatttttttttgggcaaaaagttttagtgattctaaaatttagatataaaccgagtttattttgccaataaatagcattttaattaatctattaaattcaagtatgaattacgagtttcattttcttaatgttttgacatatgaattaattagatcaaattagtataggaaaaaagtggaagcgatggagaaatgaggacgctataccgacaggaaatctccatgtaaaatagctgcttgtatacaaatattaaataatgtgacccacagaaaaaaaaagtatacacagaaaagaaaaagcgaaacatgtcaatgtttcaacttggggactattttggagggtgtatcatgttggtccacgtttctcccccgatgctaaccctcttttgtattctatgtcggctaattttttcaacgttttaaaactttttactgttattaaatataacacaaacataaataatattatttattatatgtaatgatcttacgaagaagtaagtaagagataaaagagagagtggaagtggacgagagaacaatataacacttcactcttcattactctctctcgtacgctttacaacatcggactcacatatatatagaagattatatgataggataagatagaaataggatagactacacttagattttggaagcaaatcacttagagacaaagtaattaaattggataaagagataagatcaaagtgatagattatcacttgaataattatccatttataacatctacaaaattttccatacgttttattactttttcttgtccccatatgatgtttttggtagttaaactagattataattcatatttaagtaaatagctagtttcaaacgggtaaatattaagttaaaactcacatcctctatgatatcaatggctatataatatgagggaagatttgaaaagtaacagaaatacatatactacgacaatgcttactttgatatgatcattttcaaagcttaacaacaccaagtgagtgctcacagttaagacaaacatgtcatttacgaggtatgctttccgctaattaacatatgttttttgtggcttaaatatgaacaattaattactactataatctacaactccttaatgcatttccaatataaatatggctgtaaagatgttcacacaaactaaagaaaaatttctaatacacgcctaaataataaagtgtcgttgttacaaaacattcttttatttataaacggtattcaaaaataaattcagaatttttataaaataagtccagatattttacctcccaaacaataaattggcttttggacttccaacatattacttgtttattgattataagaaggaacaaactatatatttctaatcaaagcgatattggaatcctaaaacgataaatatttcaaaacaaaaatttattcaaaaatgataatatttattgtgaaacatattaatcattacataaacattaagtttcatcgaccgaatatttttcggtagttagccgtcccgacttttcggatattttgtccgacatcaccggctccagtagtggtgttggttggctctagtccggcagcgtcttgttcacataaccggcattggctggctcttgggttctctcgtcgatgtagatcgacttttcttctgtttttttttttaattttcatgttttgcttttaataattctcatatgagacatattggtgatagagtgaaagcaatctcgctttctaatgcttcttatccgatctgttttcttttgagttttgatttatagaaatctttgcagagatttgagaatgaaattgaagaaaagaagtggattccgttgctaattatcatagcattaagctgttgtatctttaacatgagcctcgattgctttttattggtgagaaaacaaaaagatccatgttcgatgagactatcgacggtgattctttcaccggaatcggtgcccggactgcaaggatgaaatcggttcgctttagagtactcatctgacacgtgtattaatatatcgacatgtggtttggatagagtcaaactgtagtttcttcttctgtgaaagactctctgttggcttatttgggcctaaatcgtttctgtaatcgcggggcttttctttaagccttgactaccttgtttaatacaatatttctcttgagacaaaaaaaaaattacataaacattaatatctaccatttatatacattattatgtttttagattgcaacagcttattaagcttttctgtccatagatttgtctctctgctctgcatgtataaaaatgtgcatgttacttaattcttgttatatttacaatgatgattaatatttaagatcaagagggtccatatgaaaatgagtgacaactaagatgacgttcacgttctcttggtcctcgcatatagcctaggagctatggaccaactcttgcttcacctcttccataacgtaggacccttctccaattttacaatacttgccttcttttgtcttttactatctaatacaacaaaaacagaattgagttggttttgtcgtcacaagcacattttccaaattctgaccaacaagatatatcatacttgtagctcaagattatcaaagtattaacatctttgaaatttcctttgactcgtgaaacaaatacattagaccattgtaagggtttgtttagaggtcatatgaatatagtaacaatgttatataattaaatactaaatcttggatgttaatgttaaattttgtacatagcactatagctaaggacgatttattgagttataaaagctt

SEQ ID NO: 268 - DNA, 86686 bp, Arabidopsis thaliana
aagcttgaaatgtcatataatataataggaaagatcaaacgaaaactgcattagatgtttaatgtgatgtaaaacatgacctaccattatattacatagatgtcgtattttagcgtataaagttttaacttttagattgagatttgtaatttagtattcttgtagcttatcaccaccacatccattgagtcccatttaaatatgatattatacgttatatattttatctttttatttttttatgaacaatacagccccttaagatctaaacacaaaatgatgaaagtaatcatcggctgatcattagtatgcatgaaaaattcccatgtataattatattgttaaatagtttttcatttattacaaacatgatttacttgactaaaattgaaggtgagaaaataagatgtataaattaaagtgaagactattttacctttttctacaaataaaataataattacaaactattctttttctcaaaccagcaatcccactgaaaaacaaagtgggaattgtagaagagaccatctatacgcatcttaccctttctaacatagtttttgtgttcttcctactagttaaaatgccacccaaaaaaaaaagaaaattaatattttaagtaataaaattaaacgaattactactattcaacaagctgcagatgggttagtaaaagggttgaagaagtgaggctttgaggagatagagaaagctcctttggccgtacttccatctacaatcaccgcggtagccccgctgccgccacctcctcctccattacccccgccgccgccgccgattctctcacaagaaggacacttcgttagagtcgatgcaggcatgtgcatgtaaaagggctgagtcaattttagggttttgagttcttgaatctctttctgaagtcttatgttctcatctgctaatgtttcacaacacttcttcaaaaactcacaatctacttctgtttgcttcagctttgtcctgctcattcattaaataaaataaataattaaatatatataaccgaaagaaaaatcatatcacctaaaaaatagaaaatattttcacctacaaaattttctgactattaaagaaattttgacacatgaaaaaatcaaatattctgataatttataatataattttttttacctggctcttctattttgaaaccatacttcaacttgtctaggccttagattcagctgtctagccagaacttgcttttgtttctgtaaataaaatataacaacaaagaatctgattggataagaattatcaaaagtgattagtaacgtataataaaaaagaattaggattaaggatatgtagttacgggattaagggtgctatgatccttgaagctttcctcaagaagagcagattgttgtttcgtaagcctaagtttttttctagcactaataccttcttcatcttcatggtaatcacttataactctctccgtcatctcttcctcctccggcgactcttcgccaccgtctctctctcttttcaccaccctcccgcttgagaaagaagagactccgctgtgagatgacgtctgacggcatagctggtcagctccggtcaccacggtaaccgagggatcgcccgagaggcatagagtcaacgacggctcgagcttgtaaacggaggattgtctgatggtactattgtaattatttggaattggtgagggacctaatccaagaacaagacctgtgttgcatgtatcatcaaaacccatctgagtcgaaatgaaaaaaatatgcctttaaaatttatctatctttgagatttcgagaggaaaaggaaatgagtttagaagataatgggaggagatgaagccaatggggcttcttaagaaggagaagaaaagtattttttttattttatatttttaagaaattgatgggtgggtggatggctaatagttattaatcaaaggaatgatttatattattttaaagaaatgattttattttcttggtaattcttttcctgaaagaaaaaaaaaataatgtgggaaattatgatggcacaattctctctacttttatttttcttacttgcaaaggttgaccaaatgagcatctcacttggcacttgctactattcttcccactaataagagaaaagttcccgaaaaagttcaatgattttatatttggtagaagatggaattatcgtatcatgaatataaattaaatattatatttaaagctttctccattctttttctggtatcattgggttcagtcggcatcggtattttagatttttatatcatgaatatttttatcatgaagcgtacgttattgtagacaaaaaaaaaaaaaagagacgaaattagtatgaatagtaattagaaagtgattaagaggtgcctttaaataacggaccacaagacagttttacttttacccactaattttcagcctccttttccttatcatagaaacacattggcccttgatgttttattcatttatttaattatgtattatatattttagttatttttttttcttcgtatacatatggatagtgatccccaccatcttgtttaggtttggttctcttgatgtcattcaccaattaatttagtactttttggaaagagttaggcttaggcatatactttattttcgaaattttttaaacaaggtgattcatccgtaccaataactcgttacatccataattagtctcgagctttaactcacagttatctatatagattacaaagtatttcctagagttttataatatatcatatcgcgctttctctttcaagataaactgatgtaccaataaaacatataagagaaaaaaggaagtaaaatcattttgaaactaaagtgtacgaatatatttatatattagggtaaaatactaaaataagaacaactatatatataaatgtcactataccatgataacaaatgttactgatttataccatgcatggtgttaaaagccggaattcaaactattatattttgagcagtcattacatcacaaattaagactcggtcaagctatatcgctagatataatcaaaagtcttaagtccgtagttaggtttattttacccgatttttattcaaattgcaatatgtggtcgaaacagttgtaaaaaatgggtgctcaccttttaaatcactttttgtttggttacctgacgtaacattagaattatcaagagaacacacaaaggagaagtacaataaaagtgggtagaaactaaaaaaatgatatgggtgaatacgattcgtcaacaataacctaaaatctttggagtaatggattaagaaagtttatgtgtaacgtttcattaggtttggtctcagctttgttatttgttttggcacttcccaataatgaatttgtcggctatactcgtccaagtaaagtttttttttttttttgtcgaccgtccaagtaaagttaggttacccatcttatacatattattattatcattatttttaatccttaattattttttcatttataatctactcttatatatatatatgtatatatatatatatctttcttattttttaattaatgcattttcttaacgaaattctgttttaccccctaattctgctagtagcacacacacgatattaatgcttcaatcaatgaaaaataccaattataacttaatgtgatttttcagttcatatcattgtataacatttgactttttctaggtacgacgagttatcaatatgctaggaaattaagaatgatgaaagttcgtggataatcttatattaattataaattgatttttttttgaggaatattaattaaattgataaaaagtagaatagttcatcaattttaactataaactttaatatggtgtcgcaccgtggaattggtgctcattgctacttgattagactatttttctaatagaatattagtataatctgactttgacattgtgcaaatattcatgaatttagctcacattatgtatataatatagaaatatatatttgtatttgtcaacaatattttattttcttgtaagccagaagaattcaaaccaaagtccaaaactcaaaatagttcttcaaacatgtaaacaactttctgaattttgcggtctattttgttcttaaaactaaaacatttatttatatcttatatggtggtgcatatggaaaatttaaattaattagttatgtcactaattatttctgttattttgatggaccagtttacgtacgcgtgtaaataaatatgtccgataaagaaaaaaataacgagtgacttattgaaaaatagtttctttttttttttaactatggaaaaatagtttattaattagtatcatatgaatgaagataaatacgaaaaagaaaactttcaaacatgcatgtatgattgcatagtaatattaaattagtaagaaactatcaagtgctaataaatctggtttctcattatgaagggttggtccctggccgccagaccagtctcgggaggagaaggtgtggcaaacttgtttccacgacgacacatacattgtttatcataaattaatctttttcaattacatttaattaattaatcaaaatcctaatgttgaacttaggtgttaaacttaaaaaaaaaattcttgaaccaatcatttgatattttaatttcatgaataagacgacaaaaattggctcggaccaatattatttgcaaatgatttaggcgatgttccaaataaaccagacgccaaatttagtttgtttttattttatttttaatattgttttttataatatataaacggtagctcatattttactccaccatcaaatttaaacgatataagctgatgaataaatatagtatattcaagatatgtactagctagatatatctatgtcttttgatcatctataatattcaccaggagatttaccgattttccaacgaattatctaagacatacaattttttaattagaagtacatagaccatgacaatatatagatcaaatcaaatcatgatctgcaatatttacataataatatgaaatatgaatcacctatttatactagaagaaagtttttggaaaacatatcctttatatactaattgagaaacactcttgataaaaaatattatctctacatataaattatacggtataattaattacaatgttgatgtgtcacactcatagaaattctcaagaaatttaattaattagatgacatatatgtaatattggtcatacttaattttacatatttattttcaacaattaaagtttcatattctcaaagggaattaattaacaagagtatatatatatatatattgatgaaataagtgataaaatataccacacaaaaagaaacctagaattatagataaaatattattagtgtcaaattttagtagcaaaaacaaataaatgaaaaaattgttgtcagaaaacaccaataacacgataaattacttactaaatttgagcgaaaacaagaatgaaatagactatcttttaaatcttttttctattatctttagagtttggactggtaatgatacccaacacaacattttttcgtcggcatgaatacatgaacaatattattagaaaaacattgactttggagaaaagctaggtaacaataaagtaataaggatgtttttttagataaacaaacccataacataatgaagttgacccacaaccacaagtcgcatttttttcagatagttcagatgattggtaacaattaaattaaaaaccacatctttcttttttttcgaacagccatcaaacctcatccgctacaacaataacgaagactaaacaattaaaatcataacaaataacagattaattatagaaggaaaaatggaatgttcattaacactaactcttacgctggatcaaagattatatttaatttcaatgattagaggtttccgatccgacgtaatttagttttggtgacaagagtaaaaagaaaactcttaggtcgttttgtttagcttgtactaatctaaactaaatttctttgattttaattatgtaatcaatctaaaaattttcggtttggatcacattaatatattattatttgaaaaacaaaataaagaaacagagaaagtggtggttcacatgtcatcaacgataagcacatgatacatccatgaaatcatgtcatcaacaatacgcacatccatgaaatcatgtcatccctcacaaacatcttatccacacgacacgagagaagggaagcagttccaaaacagtatctttgtcagttatattcgacacgtgtcagatttagacagatccaaacatttaggtcccaccaatgatttgctataatggagtctctctggttatgattctaccatagatgtaataaatcatgataatgacgactttgatgacaattaagccactcattttcagactttaatatgttagtttcatctgatcaaaataaaataaaatatgttagtttcacactatcgtccgcgtgaccgttttgcgacaacaaatttgcgactacttaaaatagtttcaaattagtatcaaaggtcgagtttgcaactattctatgaatatttcggtagtcataaaattcttgtaatctatcctcgaaaactttaagggaatttctctggagatttcaaggaaaaggagctgtgtttaatggtacaatttcatgtgaatcaacccattgctccgtaaaaaaagtaatttagagatcatgatgttacagttgcagaagtttgcttattagctttggtctccaagcatatatggatcacaagttgaattatcctatctatcctttctctgctttgtggaatgccccttattttcatgttttaaatttatagatcttggatttcttctactttgtacttgtaaccagtttgctcggatgaatgaatgaaatcttgtttgcacaaaaatataaaaaaatacatatatatattttagtcttgttgttgtgatgggtcagtcttaaacaagagaccacaagtgaaatctagccctcaatcagccgagcaaaaacttatgctttcatgtagtggagatggctgcgagttatgaaaaacttctcatcttgggaaggtattttatgaattatgtgggagcctatattgatatgcatgagaagaggagaaaccatgaaccagaatagaagagcttgccccacccatgagtaaatatttcatagtagcctcattagatcgtacatctttcttggtatatctagataataggtaggagtataaattgaaacattttggagctacaaagatagttattagatcgttaggaagaatgtgttctacgaagtgatcccatgtccctacttacaaacctcaagtgatgttaaggaagacgaagggaaaatagaggtatgtatgaagactaagaggatagctggtctaaagaaccttccttaccaatatcgccaagctagagaaaccaaggttggttggtgctttgaactatgtctcttgctctctctttcacccattcagacggtgaattgtagagctactaaaaacgtttttcgagtctcctagagtggcgcattgaacattagaaaataatggtgcttatgagtcaaaagaaggcgtagaagcctacgaaccgtaaggatcggggtgtgaccatgtgtaattctcaaactaatatatacctaacaatcaataaccgtcatcatcagtaaaatatgttttctaatgttaatttatctattatctacatatagctgcagatttgaaatatactaatcaaaattaaataaacaattaggaaataataggaaaaatatgtggttcatcaaaagtttctattttacttttagtttctaactaatttataggcatttttcatggatgacgtttatatttttagacaaagcaattctttatacagcaattatatgatgcatactatatattgctaaaaaaaaagttacaataaatgaaaatggctaaatctgcaaatgagattggtttcatcacttgcctggtagttttcttagtgttaacaggtatacattctgaaaacaactctccgtgtttgaatttctaatttgtgcacaagaaattctaaccagtgcatattattttcaaataaactcacaacctttaacatattatacgtaactcaataactaattgtaactgccaaacacaagaaaaaaacttttctggcatttggaattgcataaaaaaaaactttattttaataaacaaaaatgctctctttttcaaaaatttaattggatatatacattttttaattttatatataatattctgttgtaaacataaaaatcaacaatcaaaccaaaatatttaatgaattatataaatatatatatatatatatatatatatatatgtaatatctttctatcaagttataattaagacaatatatgcattttttaatcaagagtatttgaataattcttacatattgattaataatgttataggacaatcgaatggaatgtcgaatggaatgcctcggacggtgccatgcatagaaggtcgaatcttatggaataggactcttccttgtagttccatactgtgtggagatcattgcgttccacacggttatagagccggcacatgtgacattgtcaacgatagggcaatatgcaaatgttctcgttgcagatgatccgactcctacgaagaatactattatttcctattatcatccatcaataattaaaatgtcaaaacgactttgtaataatgtgcaacaatatctatcattataatcatccaataataattaaaagtcaaaaagtcaaaaaaaacttagtagtaacgtgtttctaggataaaattacaaattgaattctaaaataacactgtctagtaatcacctttttcccgctaaaatataaaaatcatacataaagtgaaattaaagactttacaaagagaaaaaatctacaattgagcaatcttgacaaaaaaaaaaggacaaaaaaaaagttacaatacattagtaaacggaatgatatgagaaaggttaaagaatccagagcaccattagcgcacgccaatgccttctaagccttctcgaagagatgaagtttcacaggtcacgatccaccattttgaaatggatacgggagcaagccttagggaattatggaggacattattttgctgacgccacatgttatacacttaccagtttgaaagtattgataaaacgatgatgaagagaaatctctttattgaatatttcagcttaaggtttacaatgacagagaagggtttatatatgaaccccaaaatagtgagacaataggtcacacgtcattagctacacatcacaacagaggaacaaagaggatgaaatttgttatgaagggacagttgatgagctgtgaatcccgtacgttgatgcgctgaaaattgaggaatcttgttaccgttgcaaggtagagaagatttgaggttaatgggcttgacactttgactgaggcccaaagtattgttgagtgttgcaggtccattcgcaaaaagcaaagcttctgattgtagaggaggttctctctgattcacacaattgagctacaacttttctaagcagagaaggagcggaggaagaggatcgtgaggtccaagaaagcaattctgcccaagaccaaaccaacttctgtcgagagcacaacctgtggaaaaccatacgttaaacgcgtaggcaagcgatttaggtgacttatccacatgttaaacgcgtgcttaggaactgcgccttagaaccaaaccgaagcagtccacaatttttgagtgcttctcggtctaagcgcttcccaagtcttggctgcagaaaaaccatgacaaacaacatcatcaatgcaccacaagtaagagttcttagccaaatcaaaagacggggtaggtaaggtactaagatgatcaagaatggctaaagccggaacaaatcttgacaaagggagtcaccatccattctcgataagcatcagcgacacttgagtggattggaattcttagaagcctagaaccaaagtcgcccatatatacacttaatcaacggaccaagagaagactagctgtcaaaccaaaaggaaggtttaagatacccaatatctaaatctcttagagatcacctacataaactacttaataatttctcttaatccaaactctcaacattgccattaacaaaaattgaaattctatttcaatgttatcgttaaatgaaattgcaattgtaattgcacttaatttatccggggttttcgatctttcttgattgtttaacaaaacttttatatttgtctttgattgcccatgcctttattttttcagtgaattttcaaacgctttaagccaacttgatgaatttatttgttgccaacttaaccaaccttataagttataagtttgggtataaaagcatattatgtgaattgtttggttgttttggttgtttttctatctggccaccatcagtaataatattttttaaaatatatatatgttaatattatctaatattttcatattttgaaatatactaatcaaaattaactaaaaataggaaataataggaaaaatatgtgatccatcaaaaacaatttttttttttagtttctaactaatttataggcatttttcatggatatcctatttttttaggaaaaagaaattctttatatacaacaactatatgatgcttacatgcatgtatataactggaaaagacaaacaagttacagatgaaaatggctaaagctgcagctacgaatgattttggtttcatcacttgcttggtgattttcttggtgttagcaggtatacaatatgatgttcgaaccttgccaaagtgagattttgttggttgtgttttaatttctaactagtgcatattatttcaaataaaatcataattgtgaatatcttttacgtaactcaataactaattgtaaattcaaaacacaagaaaaaaaaaactttctgtgcgtttagaatttgcataaaagctttgaaattttttgttaaaaaaaaacaaaaattgttgacaaaaaaaataaaattgctccgtttttcaaaattttaatttaatatttttttaaatatttctatatatataattcacttttaatcataaaaccaaagtgatttttgaaagatattatatatatatacgatcagtttattttttgaaaatatcttataattaagagaaatatattgtcaagaagccttagtagttgtaaaggttttcttgttgatatcattcgatggcaaagtgccttatattatacacaagctaagtatctaattgacctaatacaataaactgactcatatatgtcgttcatatatgttgacatactcatatatatatatatgcatttttaattaaaagtatttgaataattcttacatattgattaataatattataggaatatcaaatggaatgagaatgactcagaaggtgtcgtgtatagaaggtcgaaccttatgggcgaggcctcctaagtttttttattgtagttctactctatgtgaagataattgcattaatactggtgcttatagaggcggcacatgtgacatggaggacgaagtggcaatatgcagatgtcatcgttgtaaaaagataatatagttatttatttatcatcaataactaaaaagcgaaaacgactttgtaataacatgcaacaatatctttaactattatcatcctttttttttttttgttaaagggtttaactattatcatccattaataataaacattcaaaaagacttagctgtttttttattttggtaatgtacaaagggtggaattcccctggatttattaaaataaaaataaaaacatagtacaaaccaatctgttgtggatacgcaattccaacgacatcatctctcaattgtgaatcaacaacaataacaaaaaaaagaacaacaacagaatgaacaaaaacaaaagcgtgaaaacctagaaattttgaaatccatcaattttagacttacatgtagtaacgtgtttctcgctttctaggataaaatatctttaaactgacgatatttttggccttcctgacatggacggaactatgttggtgaagatgttgtgttgattgagttttagaagctatctaaatatgtcatgagattgctgctgatacaagaagtgatgtgataaatgagacagagaaacatagatggaatcgtcatagatgtctcattgatggtgtaacagttcatacaaagtcattgggcagaactaacaaaagtaatgaagtattgcttgatgcagatgctagtaaagcaaaacaaaagtagtacttcgtgaaagtgctaacaaaatgattaacaaaatgcagaaaatatgttgtattaaataaaaaaatcgcatccaaatatttcggaggatgtatcagacgtctgaagcagttcttgtactagttccgacattattctattttttttttttaataccaagaagttttttttaatacaggaaatagtacatgaagctgagttgtgtgacttcttcgagagttggagtacaaaagtttgggaccgacttggacaaggaagagaaaccaaatccaaaaaatacttggactaagagcaaatccagtgattaatttctaagtaaagtttttatatatttttttattgataaatttggatagttttgtattttagagattttttagagtttttgaaaattttatggttcattggtggaatctttaagtgggtttttaaaacaaaaaaatttgaaaaagggaaaaactgaatctacatgagaataactgttgctggataagcttaaaggaagagaaaacatttttaatcattgtttgcatatgccattggcttcacatccgggtaaggatgtataatcaacaatatcagaaaattagaagagttttagagagaagccaagaaactcttatatgagtatggttcgaagaatggaattggtgaaccaagtcgtcgatgatttggctcttctctcccgatttcatgttcgatacaccggagatcaaatcgattcgaatcgccggccgtcggacaaaacaaaaaagtgaaaaacgagaggaaaaaggaaaacatgagtgttgtgattttttttgttttccgacgactcacagtcgaccacgtcgccgtctaaaaacccatccaaaaaacctaatattgggatggatcctaattatttagttgggttttcatttaattttggacttttaattagctagaaacccattagaaacccattaaaaactgccgatggacttgctctaagaagtcttcaacggttttctaaaatctaggatcagagtaagcacgttgcatttccatttttttacactctctctcgtgataaaaaaaattacagaatcacttgcaatgtgtgggaaacaaaaaaaaagaacttcaaaacaaaaaccggactatcgttcctcagcctcacggtcgtgaaacgatagtcggaaaacccagttagagacatttgacatcgtcttcttcctcgaaccgtttagtctttcgcttttactcttttggcatcttctacttgagttttcatcatcaaccaacatcttcaatctctttaaagcaagctttaatgtctcatcaatcatgttcgcgaaacaaactctaaaccaacccggttcttcacaatggcacgacgaaccaggagagatgttgagcttcacttcgtaaacaatcttcttccaaagatccatttccgcttcgaacgttttagatctaaggagaggtctcatgtcgacccaacaaaagagtcccgcattactcttcagacatttgatcccgatggcctctagacccaacacgagctttctctgtctgttcttgagccgtttttggttctctctaaggtagttcttagtgaacttcttgtcagataataatgaggatagtaggtattgtgtctgggaggagacaaggccgaaacttgacatttttgtagcggcagagatgacatctttgtcattggagtaaatggctccaactctaaaaccagggaggcctagatctttagataagctacaaacaatgtggactcggttcaaaacatcggtgttttcgagttgattattttttagaatctccatgacgctgatgaattctgaagagttgaatactgtgcccgaatatatctcgtcacttactaaatgtatattcttattcttggtgatgaaatcaaatagaatgttgagttcggtttgggttgttgtcgtacccaaagggttagatgggttggtgatgagtattcctttgacgtttaggtcaagcttcttggcttgctcgtaggcttcttcgagtgcaagtttcgttatgcgaaacccgttagtacttgagctttggattggtacaatctcaaccccggttcgccattttagatccctatcaaacctgaagtacaaaaataaacatgagttttagttaagtcaagttcgtaggaatgatggaaattttacgtgtaagcaaacagtggactaaccctggataatatggcgtgggaagcaagaaagcgtcaccgggatctgcaagacaaaacattagagtctcgtttgcggaagtggctccagcagtgagcacaaggttgtttgaatcaaaagaaactcgatttcctctattttctgacatgaaatcagcaaaggcctgaaaatcattcgagcaagatcagcaacctacaaataaatttgataaatacaattaataatcttacatttttgaaggaagagaggccatggtagtcttgaaagagagcgagttcccggaaaacagactggccatctctcttgaaacaggctgcgtctgtgttttgtgcaagccatgactctagtagatcaaagcatagctacagaaatccaataaaattaaacatactttaaattagtctctctgtcatgatatacataagtatatatatatcacatgctgttgaataatatttgtttacctgattttccgcaagacccatctggataatgccttgagggttcttggtaacgtcgtaaggattcttctcgtactcttcccaaccaaggaaatacgaagagacttggccatggctgttgcatgtagcttttcttgacaattgaaccatttcttttgttcttgtttttttttttttaataaaaggctcaacaataaattgaaaactctagaactagagaaagagttgtcagacaggctgagagagatcgagcgcgttgttgttgataagctacgagaagtctaagaatgaatgcatgtttattatatagtttcatgctacgccaaaatacacaaaggacggggattctaattattttcattatccgatttaccaacatgggttttcttttgattgttttttgttttagtgatttatttttatttttttttgggcaaaaagttttagtgattctaaaatttagatataaaccgagtttattttgccaataaatagcattttaattaatctattaaattcaagtatgaattacgagtttcattttcttaatgttttgacatatgaattaattagatcaaattagtataggaaaaaagtggaagcgatggagaaatgaggacgctataccgacaggaaatctccatgtaaaatagctgcttgtatacaaatattaaataatgtgacccacagaaaaaaaaagtatacacagaaaagaaaaagcgaaacatgtcaatgtttcaacttggggactattttggagggtgtatcatgttggtccacgtttctcccccgatgctaaccctcttttgtattctatgtcggctaattttttcaacgttttaaaactttttactgttattaaatataacacaaacataaataatattatttattatatgtaatgatcttacgaagaagtaagtaagagataaaagagagagtggaagtggacgagagaacaatataacacttcactcttcattactctctctcgtacgctttacaacatcggactcacatatatatagaagattatatgataggataagatagaaataggatagactacacttagattttggaagcaaatcacttagagacaaagtaattaaattggataaagagataagatcaaagtgatagattatcacttgaataattatccatttataacatctacaaaattttccatacgttttattactttttcttgtccccatatgatgtttttggtagttaaactagattataattcatatttaagtaaatagctagtttcaaacgggtaaatattaagttaaaactcacatcctctatgatatcaatggctatataatatgagggaagatttgaaaagtaacagaaatacatatactacgacaatgcttactttgatatgatcattttcaaagcttaacaacaccaagtgagtgctcacagttaagacaaacatgtcatttacgaggtatgctttccgctaattaacatatgttttttgtggcttaaatatgaacaattaattactactataatctacaactccttaatgcatttccaatataaatatggctgtaaagatgttcacacaaactaaagaaaaatttctaatacacgcctaaataataaagtgtcgttgttacaaaacattcttttatttataaacggtattcaaaaataaattcagaatttttataaaataagtccagatattttacctcccaaacaataaattggcttttggacttccaacatattacttgtttattgattataagaaggaacaaactatatatttctaatcaaagcgatattggaatcctaaaacgataaatatttcaaaacaaaaatttattcaaaaatgataatatttattgtgaaacatattaatcattacataaacattaagtttcatcgaccgaatatttttcggtagttagccgtcccgacttttcggatattttgtccgacatcaccggctccagtagtggtgttggttggctctagtccggcagcgtcttgttcacataaccggcattggctggctcttgggttctctcgtcgatgtagatcgacttttcttctgtttttttttttaattttcatgttttgcttttaataattctcatatgagacatattggtgatagagtgaaagcaatctcgctttctaatgcttcttatccgatctgttttcttttgagttttgatttatagaaatctttgcagagatttgagaatgaaattgaagaaaagaagtggattccgttgctaattatcatagcattaagctgttgtatctttaacatgagcctcgattgctttttattggtgagaaaacaaaaagatccatgttcgatgagactatcgacggtgattctttcaccggaatcggtgcccggactgcaaggatgaaatcggttcgctttagagtactcatctgacacgtgtattaatatatcgacatgtggtttggatagagtcaaactgtagtttcttcttctgtgaaagactctctgttggcttatttgggcctaaatcgtttctgtaatcgcggggcttttctttaagccttgactaccttgtttaatacaatatttctcttgagacaaaaaaaaaattacataaacattaatatctaccatttatatacattattatgtttttagattgcaacagcttattaagcttttctgtccatagatttgtctctctgctctgcatgtataaaaatgtgcatgttacttaattcttgttatatttacaatgatgattaatatttaagatcaagagggtccatatgaaaatgagtgacaactaagatgacgttcacgttctcttggtcctcgcatatagcctaggagctatggaccaactcttgcttcacctcttccataacgtaggacccttctccaattttacaatacttgccttcttttgtcttttactatctaatacaacaaaaacagaattgagttggttttgtcgtcacaagcacattttccaaattctgaccaacaagatatatcatacttgtagctcaagattatcaaagtattaacatctttgaaatttcctttgactcgtgaaacaaatacattagaccattgtaagggtttgtttagaggtcatatgaatatagtaacaatgttatataattaaatactaaatcttggatgttaatgttaaattttgtacatagcactatagctaaggacgatttattgagttataaaagcttgtaataataaatatggtttcttagagctttgtatagtgacaaggcttcgatgtatctgtcttcctttttggctcttgtttttaacaacttgcaaatttggtcgatcgattgataactacattgtcttcacattcgaaaagtcaacgaaaataacgcatttctaaaaccttaccatttgcaaaatttaaagaagccatttgacactataacaacatctttcgaatcagtaggactaacaatattcaagtgaaaaaactacacctacacatgatatgttcaatttcgattccattagagccttaaatttgtctgcatagagagatgacaaagtggggtcaattttaagaatacaaagagtatacacaacattgaagcatggagtgttgttggtctgaattggatcttacgactgaaacaggacattttaaaaacattgcaataaatatgaactttgcacaagcgttaccaacaacacaatctctagccttgctttgaaagctcttctgctttagatttttgttgcaacttgttaacccaataattatttggaatttattgattttgtttctgtaccatatctagagatcaatttagcctataacacgacctcatcgattccaagtattgatgatgttggaaatagaatagggcttcgagctgcactttaaagcccttaatattttgttttaaataggaatttctgcaaaaaaaaaaaaaaaaaaaaaaaaaaaaaaaaaaaaaaaaaaaaaatcaggaaatcgtaactttactatttatttttaaaaaatgcaggtcaattccgcaaagttaaaagtaatccgttaaataatcgttttcattacctgtcaagttcttaaaattttaaaaattatatatcaaatcaaagtcttgccgacatgaaatctaaatttacctttataatattaaaaatcttgtgtatatgactgtgaaaatgtttaaggagaaatttgtggaacatacggatatgtaagagaggttacgatggtgttcgaaagtgagagattaatatattgtagaagtagaatgaaaattttatcgggtttttccacagttatgtgactaatatcgcaggacatatatatgatgagactgatcaccatgctgaaagacagttaacaacaccggaactaattctacaaggtccaaaaagatgttaggatatacaaaatatacagcttcccattgatgcactttcaaggctctttgctcacagtcatatatacttaaggagctatgtttacactggttcctaagctatctagcctaaacacccacatgattagcatcaagcaactaagatattagattaaaagttacaacatttgcctgcatagatcatttaatgtatgtaactcttgatgcatcattaaggaggagcacggtatatggcagggattgtacgagggaagaacatttgtctaactccctctgctttaattattggaaagatgatgcttgaagcactctgtgaaaaagaaaaatatcaaagatcaaacttctttgcgatgttgtgtatataccacaatgggaagagccacataccgagattatcctagctccaagccaaaagctctcaatcgaaggaaatggtagcattaaacgacaaacagcgtagatcgccacagcaaagaagtggagaactaaactcagaggacgagggtttaaaccagagagcaatgcaactggaccagatgagaaaacacctccaaggctaagatagtcgaagcaagcttcacgcatttccgttcttgcttcatctgaagatgctaaaaagaccttatacaacgcatccgccaatgtattaatggtggaagctacaggctgttgcaaggcgacacataagtccactaatcaaaacataaagaagcgtttacttttaactaaagagatgcttacttttcgtagtgtgtaaaaggattcaatatacttagacaaagcttctttgtcattaaggttgcgaattggccttagaagatcacggagtacaactatatccgccaatgcaacggtcatcccaccaccggttaaaggatgtctcatgttgaatgcatcaccaagaagaagagctccaggagtaggaatcggatcagctggcatgcttcggtttggcatggttctgatattacctttctcaacagcggtgatgaatgcttcacggaccttggttggtacttgaggcgcaacccgtgttttcagatactttgccatttcaccatttgcaatgggaggaagtttttgacccggtacatctactaagcaacggacttcagaactgctgatgggatacattaagatgggtgatgggtcaccgagaacaacgtgcccgtgatttgcaaatggaagttcacagttctccaagacaagacccacaaaagtagatggcacatccaccttaggtttgcaaagagagcgacgcaagttggagaaacaaccatcacatacaattgtgagaggagcaaatgatctaaactcattgccctcttttgttctgtatcgaacccctttaattgtcccgtgttcttcaagcaacgacgtaaccgttccttgttccaatcgtacactgattcacaaacaaaccgttagagtcaagctggattcaattaaagaaacaatcaatataaagattactttgaaagagtaagggctttttctcgcattctctgtacaaatctcccattatggaaacttctcccggctacatccgaatcaaacgtttccaaggggtaagcaagtttagtatgcttcccatctttaaagagaacataaccaagaactcgttgagcatcaatcttcttcacacaatctacaatcacaaaacgcaactatagaacaaaaatcgattccaagtatatatatatataacagtttaagctcattagttagtctctaccttcaagtccaagttctattaacttcaaataaccaccaggttgaagcaattcaccaacgattctgtcttgctcagaaaaatctctttctataacgtgcactcttcttccttccttcaataaccacacaaaggccaaaatttcagacaagaacttacgtctccaacacacaaaaatcagacaagtatatatctccaatgttccgggaactaatatcacatcatttttgtgatcttattacaaaaaatataatcaaaaacaaattatattacaaaataaatgttaaaatttattgaaatgaatttagaaaaataaattttcatgaataaatttggagaaatgcaaaaatcaaaaattgagattatagacttgccttgccgagagtatgagcaagagcggaaccggcgacaccagctccgacgatgatcacatcagtgccagaatcaacctccgtttcaagatttttggatacggtatcgttttgggaaacgacgagtccacgattcttcttattcttattactactccgacgcaaaatgtagagaagcagaaacgtaaatagagaagctataaattgatccaacgcaatcttcgccggtttcatcatcaccgtggagttcacggcggagagtttgagtgtctgcgccgccgttgctttccatcggcgaatgtaggtggctccggtggtgaatcgacgagtagagagagagaatcgagaagaggggcgatgatttgtgtagagaagcgaagatctaagagttgattgaaatcttggaaggttcctgattacgaatggtttcataattttttgtttagtttaagacaaacgaatattgctagatcaaatatctagaaccgaactaaaaccgagaaaagaaaaattctgaattgactccaaaccgataaattattccaaaggattatagacttttatactcaaaatatcggaataaaatccgaatagatatccaatataataattatatttaaatttgatgtagtctagttatccaaaaactaaaaccataaacttaggaaagtaattacttttatatttaaaaaaaaaaaaaaatcgaagttttagttttttataaaaaaaaattactatttttaaattattttttaatattccaggtacttgaaatcgaaccgaatctggagagatccggatcaatcaagtccagaaaaaaccaaaccaaataattgattggatcttaaatctttatatccaaagtacttgaaatcaaatggatctactcgaaaccaaactgaatttctgtttagtagtagtagctagtgatgggagtgtaacattattgtatttttgagtaataataaattttcttttgaatgaaaaaataacaaaatagtttgttaattttatcaaatgtatattcttaatcccataaataatctaatagagcaaaaacttgcagtttatacctttaaggttttgaattcttataataaaacgtttagttgtcaatattgctacttttaacctttaaatggttattgtgttcagggttccacaaaattaactgacaaattgattatgttaacaaaagatattcatttttgttataaatattgatatgactctaataattatttttcttttagtaaacttttaatatctattaaattttatatttatgactaataagatatttgataaaaaaaaatcataagatattttataaatcaacaaaaatataaaaacatttttgttttgggtaataattatattttaaactgttaataaaaattccattactaataaaaaaatattctaatataagttaacagtattttttgtttttacgttgtcaacttaacgtagtaaatatttctattgtttaattccaaaccattagctattagcttaaaggcaagtgttttttttcttcttctgtttgtcttagaaagaactagtatggtttgggttcatatgaggtgggtatcaggttatcacgtgcatggttttagtatagtttggatccagctcccatcctagacttctaggcacctttaatatttgattacgacgaaaaggcttatgtgaatcgaaaagcccaacttcttaatttcaaagcaaattaaaaaaaaaaaaatcattttaacctttttggaaaatagaaaggtaaggtgaatttgaatttctgaacatttgatacgaatgcaaaactcaagatgcacatttttcaaagtaatgcccctagaattgtttgcaaaatctgctgtctaaaatttttttgctaggatcgaaccgattttcgattgggatagacacgaattataaatcatattctaatatcatattagattatagacttccgattcaaaacttattggcaaaaaatgaactgactcatataatttatataaccattaaaatcttatctaatttctgatttaaggtttcaaatacaaattattcataacctaattgatatgagtttcactagcgatgaatatgatgtacttatgtacttatgttacataagggataaggccatttgaaaaaaaaaagttgtaataaaacttaaacccaagagataggattgaaaaacataaatggcccatgtaactataatcagctggggtacattggagaacaccattagacagtccaaatacaattgggaaccacgtgaatctgatagatatttgatactcaactcaatactatatttattatttcaatacgacaatctcattctctaacttctttcatactaaaatctcacttaaagtataccccatctttccctttgcaacgtttggtaaaaatgcataccataacaaattttagagcaaaaagcaaaaagcaaatgaaaattcctttcttagggtttgaagttgaaactagagagacatgtctcacgtggtgtccacatgtcttttatcttaaaaagttcattgtttgcttcctctataattatttttctcatatcacaaaagtaaccacaaaattattaaaatcttaaataatacataaatcaaaataaaatcatacgtagagcatctgattatagttttcatttctttgtagtaacatgtccgagatcttgattgtgttttcggtaccattctttgtctccacccaaagctatatcatatctctcactcccacaattattactttttgttattattaaataataaatatcctttctccaaaataataaaaataatatctagagtataaaataaaataaaaaaacttagcctcgttcttctccctctgtctctctctctctctcggttctcttcttcactgagctcaaagcgattacctcccatgggaaaaatctctgaagtgattatttagcactactttttctttgtctccttctgaatccattttttatggatcttggagttcgtgtttctggtcatgaaaccgtttcttctccgggtcaaactgaactcggatctggtttcagtaacaagcaagaaagatccggtttcgatggtgaagattgctggagaagttcaaagctctcacgaacatcaactgatggattctcttcttcccctgcctctgctaaaacgctgtcgtttcatcaaggcatccctttactgagatctaccactattaatgatcctcgtaaaggacaagaacacatgcttagcttctcttctgcttcaggcaaatcagatgtctcaccttatcttcagtactgtagaaactcaggtctgaactgtaaaaacaactaaagtactctgctttttttttttactttcttgaaaatcagtatatggcttttgcttagagttagattacagaaatgggttttgattagagtttgatttagtgaagtcttgattttggaatattggttttgttgtggtgtcaggatatggtttaggaggaatgatgaacacaagcaacatgcatggaaacttgttgacaggagtaaaaggacctttttcattgactcagtgggcagagctagagcaacaggcgttgatctataagtatatcacagccaatgtccctgttccatctagtttacttctctctctcaagaaatcttttttcccttatggttccttgcctcctaattcttgtaagttctcttccttatcttttgttttcaaagatttgagattattgatcaatagttttgattccttttatctccaatacattagccaagaattaactttatactatcttttttagtgtatagtcctttggaacattgaatcttgtatggattggtggtgggtttattaaagattcttgctttgttaggggaatggtgtttttatgagatcttgagagatttttttgttttgtgtgattatgaagttggatggggctcttttcatctgggcttttccggtggtaacatggatcccgagccagggagatgtcgccggacagatggaaagaaatggcggtgctcgagggacgctgttcccgatcaaaagtactgtgaacgacatattaacagaggccgccatcgttcaagaaagcctgtggaaggccaaaatggccacaatactaatgctgccgccgctgcttctgctgctgccgcttctaccgctgctgctgtgtccaaagcggcagcggggacttcagctgttgcgatgcgtggatcagataataacaatagccttgccgctgctgttggaacacaacatcataccaataatcaatctacagattctttggctaacaggtgaaaacgtttaacatctcttgcctttttgatataacttatctgcatattcttaagtttttaatgttcatacctttttcaacttttaaatacttctttgccctatgagtaagtagtagacccaccaattcattattactacatcttttatgattgtgaccactccttattaatatgaggcttaggattccatatatttggatttttttgctttaatgaactgtttactctccttttcttgatgattcaatgatgtaacaaattaacaagaaatcttaatggttgtttgttgcattgcagagttcaaaattctcgaggggcttcggtttttcctgccacgatgaacttacagtcgaaggaaactcatccgaaacaaagcaataatccctttgaattcggactcatctcttctgattcgttacttaatccgtcgcataaacaagcctcgtatgcaacctcttccaaaggctttggatcgtatcttgacttcggcaaccaagccaagcacgcggggaatcacaacaatgtcgattcttggcccgaagagctgaaatcggattggactcagctctcaatgtcaatccctatggctccatcttcccctgttcaagataaacttgcactctcacctttaaggttatcgcgtgagtttgaccccgcgatccacatgggattaggcgtcaacaccgagtttcttgaccccgggaaaaagacgaataactggataccaatctcctggggtaataacaactccatgggaggtccactcggcgaggtactaaacagcacgaccaatagtcccaagtttggttcctctccaacaggcgtcttgcaaaagtcgacatttggttctctttctaacagcagctcggcaagcagcaccatcattggcgataacaacaataagaacggtgatggaaaagatccgcttggcccgaccacgctgatgaatacttctgctactgctccttctctgtgaaactgaaaaaaaaaaactaaggacaattgcgaaaacaaaaacactctgtttttctctgtttctggtttttcttacttgatgcattgttgtttctgttgctgttttctttctatataaagcaagaagaaactaaaggagagatgtgtgtttttttcttcataatctttgttctttgtttttcctcttatttgttctcaatcatcaaattcttgattttattgttcctcttatagccgttgagctaaatccctggttttaagaagtctatgtacacaatgttctaaaactgaaaaatatacaaatttttacttttttcactaaccacaaaattaaaaccaagtgttagtgtcacaaaatttgtgatccttgagagattttgacgagaggtttcctagttgcagacaagaggcaacattgtttgtggattggacatagaacacttcttcaaaacaactgtctccaactttagtttttttttttttttttttgggttctgtttctccacttttgggtccctgtaactactttttgctcttctctctctaaccctacctttcacttattcctgtttttgtttttcttcaagaaaaaatgaaattgattataaagagtggaggaggaccaatctctcaatgtatggatggtccataacgtttttaatttggatttttttgtgtaatttttggagattttattctaacacgtggcatgtgtgggacgatccagacacttccacttgcactagacacgacaattcttaccgaataaatatcttcactagatgcaagatgcttcaagactcaagagtacagtattagatatagtttggagtacataaccttgttgctttcatatgataaatttagtgttagatcattaacaatcttttcccaaaatggttaatggttaatggttaatggttaatagttttgcatatattttaaacaaataatacgttattcaaatttgcatatatttttctaactatacttaattccgtctacgtacttgataaaaaaaaggcttgtaggaagaatcttgcggtctgtctacttgaggaataagaaggaatcaaagaggaaacaagctgaacatgggaattgggaagtctgtgaaagactctggttgacgtagaggtttcattccaaccctcaaagccgacgactccaacttgatgcagaaggttttaaatacatgatagggtggtagtcgtcaacaagagtagttgattaggcttatatcttttagcccactcactaatgggccttgataaatatgattagagaggcccaagtacgaaacaacagcaaaaaaaaaacgaagtccatcatctaaagtaacactcatattctcatttacacataagagtgatcaaaagagacacagaaataaaaatacttcgcttttatctaattttttttttccgttctaaacttttttttttctatttttttttctttcaaatcatatgatgatgattgatgatcaatgatggattcagctgaagctgtctgaaaatcaaaatctgcctcatctccaagaatctccgtctgagaatctcttgttccgacaaaagctgattgttgtccgtacacattaatgcgatgttgtacaaaacaattcgaagccggtttgcgagttcccggttttctaaaccgagacgatttgcttcgtcttttaaattatcaatgtgtctttgtttacgcatcctcgaccgcttcgctgattctcggtttgattccatccgtttgcgtttacggtcgtcagtcacctgcaaaaccgaccggttcaatttgttccggttatgattcgtggcgttacttcggattttcgtgttttttgagtccaattcgtcggattgaggactcggtacgccgtggaaaaggttggaatcatcagaaccggagttagttttgatggaaccgatacacgattcgtcaaaaccgttaaaatcggtgttaattttgacagaaccggcatcggattcaccagaacaaggactcggtacgaccggttcgagatggattgtagagaagagatcggagcagttcaattcccaaggagtgaatccggtctggaaatccgataattggttaaccaaacccggttcagtaaaggtaaaggccggtacagtagacatcataatgaccggtttaaaattgtttaattagagagaagagagagaagagaaggagaaaagggaagcattgatttgaaggagactggaatttaaaggaaaattggtaagggtattttggtaatttttgaaatactatgtatgaccgtattttatacgtataacgacttttgagtcatgtggcactatgtggggttggtattatttttcaagacccaacttttatgatttatatgaaagtagaaaaatattttgtgggacaccaatagccaataggactcgtttaaggtcactttctgaaaataaaaaagtgattaaaattgttaaaccaaatgtttgttatagcttagtgatgaagaaacagtccatatttaacacatgcattgtccattcatctaatttgtcgccattgtattcaaatctagatttacaacagaacaaagaaaaagagagaagttcaaataaataaaataaatttgaggctcaaaaaaatgaatatggtgtcgttggtcgattgatttatatgtgtagttggtgtaattagtggttggacatgaaacaactaacataaaattcaatcacaacgttcgtttttggtttttatttcaatcaaaatttatctgattttaactaaatccagctttttatttcatattggttcgtatcaaaaatgtttttttcttttccacaaaatgtttgagtaagttgtttatatgattttagtatttgaaaggtacttagagaatctatatattagttggtacctggtgtaactaccaaactaaaaataaataccgaatactgatatattttctcaatatgttattttttgtgtgttttttatcaatcgtgataaagtaatttcaaaattaattggaattaaacaaaatatttatgtttaacgaaaagctatttaagaacgaaagagaatcttatttatctaacaaataaataaaagaaaaaataatcttatcaatgaataatacgtccaacaacaaattaatgatttttaaatacatttttgtgctctaaattttcggttagttagtttattcgaaataagaagataataaagaagagaaaaactatagcaacggccacatgccaaatcttcaaaagtagtaaagcagaaatatatttagaaaacttttattatatggtttggtagcatgttaaatcaaactttaatcgcataaagatgtatcattcaaatgcttcccacattatctttttagttttaataatcacaacttctcttttattaaatatatatattgttgctattatagaatataagtaggtgattctacgtattttttaacgcatcaagatttactattgtctagcccaatttgttattgaaatatcaaatcgtgtaaatcttgttcagaaacttgcgtgggctcgaatttggatgtagggagataaaactggcattaggctagctaataggcaaaaataaaacaaaaaataagaaagactgaaataaatgatatcatcagttcatgatttgatttgattttcatgctctaatgctaaatattttttcttgtgtcattttgatgaattagagatgtccatctttattttaaaatcgtacattgacgcaaaatcttcgctaaaataaagaaaatataaaagtggcactgaaaatgttaataactttattatttggtttaaaattggtcttccaacctagataaaataattttatataaataatttttctctaattgaaagatcctatgtaaactaaactgaataaatacacacacatggttctcactcgaagaaaactcttggtcagattttggttcaccattcactaaaatctctgggttgagtctataagtctttcaaatccaacaaaaacaacattctccaaagaaattaaaagtaactttttagtagatcttaaaaatatgtcctcacaatttcgttataacatatgtatgtatacaaccttttataaatcataaatcaacttaaaccacaatgataagtacaacaaatttatccaaagatatgatactcatataatataaacattgtatatgcatttgttgagatatgatatatcatatatgtatatgtcatatttgatattcataaaaaaaaaaagtatagtatgataatcacaatcaatatactttgtgccctcattgaaagctaaatgttaagatcatcaagctttgatgatcttgattacaaccatgttttattattgttaagcaaaagaccaaaatttttaatatcaagttttcaccaccgtcacaaagcgatcctttatggtaaacttctatttaactctaaaaatgttgatggtgtccttggtttcatcagcgatagttttggttagtcttaatgtttcctaagttaacatcggtgttatctctccacgatctttgttggaagacaaaccaacgtcccacatcaaaaaattagaaaataacattctagtatataattacttacatgaaaagtcaactaaagcgtaaacatagaaaacactatcataaagtgctattaatatctgtttttcgtatagtgattcaagtccaactcaaaattagtttgaggtctttcgggaaaatgtccaaaaacaaatccgtgcgagcttgaaatttttgtataaagtagacaagtttacttgggtttcgggagccaacaatcttgccttcaaacaacttatttgtagtagagtttttggtcgctttatattgtcgctagcgataattttctgatcaagctttacatctttgctggagattcaaatatccagtagttatcttgagtttcacaagagagaattacacaagtgtgtcaaagactagctatagtaattttcgactagctcactcttgaatctcttttattacaaactaggtaattacccgctatattacaagaaaacacgggttttcaaactacaacattagtagcaatatactcgttaaagtagaagtcgactatattacgagtaatagccttagtcgctaatccagagtcgctaaacaaaatagtcgtaactttagtcgctaaatgaccactacgatacgactaatacccgctgtcataacattagtcatattgtagtcgtaaaatataacgactgagttacgattgaatcacataaataacgagtatcgtagagactcctctgcgattatttagcgaccacctagatgaaaaaaaattaataaaataagtagaataaaatgaaagtagtgcttggtacattattatgatttttatttattgaatgtttttgagaaaattcatttaagagtgagattaatggagaatttaacacaacaaaagacttttgattttttctcaattagttttgctagttgaaccaatccaacaagttaactcacaaaccaatcaataatttcttattttattttatttttatgaagtttggtgcattaatttatagaagcaacgagacatgcatggctatgtcctagcgaacatagagtagtagtttatacaagtataccaaagctaaaccagtctcgtgaactatatatatacgtcaacaccgaaactttggaaatgtataatacttgtatagttagtctctgtgtctgatattaaattgtacataaatttctttatgattacagtttttttttcccccgatttatttgacacggtttgggttatatatatgattagtcacacaccgacttgtaatatactctccaatacacgcttttaaatttggtgcgttccaaacggatgataagaacaccatgtcacactaatcgggtagggacgtccactaaccatattgacagttgtatcaactacaactacaccatatataacggtagatccattgcattcgtgtggaatctatagtgtttatatttgcatatatcatgtcaaatgatattttgctaatgtaggtaggtgacgccatagaacttttgaatatattaatatggaatcaatgcttttaagaagtggatggtgattatcatttatcactctatcatcccacgtttcatacacgctgcgacttatattttgatttacttttcttatgggtttggtccaattccaccgctaaacactatgcacaagtgcaaacaaatatttaattaaattcaacttccgatttaatcggtcattcaaatgagactaatgagtccaccaaactccacaattagatacccataaataaaatagaaaattcgaggttatcaacgtgcgataagatccactttttgggttatataataactaaataaatgaacaaaacaaaaatagatttgactaaaatttggctataaataaatttgagtttcaaagaagccaaacccgtcaacacatcttctttaagcatctctctcccttcaaagaaaatatcacaaaaatggcaaacgtctccgctttgctcaccatagctcttctcctttgctccacgctaatgtgcactgcccgccccgaaccggccatctccatctctatcacgactgctgccgatccatgtaacatggttagtctgattcacatgccatgcatgaatcaatttccatatataaacacaaaataaccaatatcagagcttctaaatttttaaaaatatttaacacatcgaataggtttaataaattttttgtaatgtatgatgattactttggcaggagaagaagatagaaggaaaattagatgacatgcatatggtagacgaaaactgtggtgcagacgacgaagattgcttaatgaggaggactttggtcgctcatactgattacatctatacccagaagaagaagcatccttgattttcacttactcatttctaacaaacttttgctcaagattatgtaatttatgtcatccttaattagtatttgtcacatacaagatcaagatagttatgattgtgattatttatatgtattttggatgatatattgtagaactagaagtttgacaataaaaagtttatagtgtcgttgtatgtttaagaagtttgacaataaaaactttatagtgttgttgcatatatgtgttgaaaactcattaaaaacacacacacacatgaagtacgcgtatatttataaataaactataaaattgagagtggattcatggaatcttttttattgaaaatacatgttggcttgtttgattagttgagagactgctaaacatttatttcatataactagcaaagatcgatatatcgtcgtgtacacaaaagtactactgtatatgtttgatcgaatctgaagaaccaaatttatattttcagactgattgtgtatatggtctcgtaatatacaatcatatgataattagccatcactaatgtagtcatgtctttatgctgaaagagtgtagagactctgccgtcataatgcagctgttaactacgagagcgaagctaaatatttttgaaaagctcccacttcaatcgaacggagggaaaaacctcttgcgcatggaatagagtagtcaacaatcatttgtaattgtaatagaaaaaactagtttaattagaaattgagcatcaaatttaaacagctctgtaaaattttctaattgtaataagaaatttttgttatatctgtcttaaaatatacaccaaaggtagacacaatatctcctacaagtgcacattcaacttctagatatagacaaagttccaaacttataataagtttttttgcaaagttattggttataattaagtttaattggtttatcaatgggtaaagtatacagtaaactgattaaacctagctatgtgggttatagatctcgaactatttactcgaagtacattaagttatagaactttcatttcggagaaaataaggataaaacttttattttatagacatatgaactagagttaaaatatatgagctctatctactgatactttttatgagaaaatagaccttttttctaaaattatctttgatgaaaattttgtttggtactccaacatgtgtacaaaagttgcgctagatcaaaacatatgtaagtaacacaacttatgacattcttgattgcaaaattagttaaaatctagttgtttttatattattgttgacacaaaaaaaaatgtcagcatatgaaagcctccgtctgaagcagaaggaacgactctggtctaaaactctaaaaaccctatcttcttcgttctaaacccaaaacacacacaaaacaaaatggtgctacttctccgatatcgatccttaacgataaatctcactcctctaatacccaaatctcaaaaattccacactctccaatcatttcgtaaccctaatttcatctccatcccaaaaatctcagcctccacgaacaatccaacaacaacaacgaatcggtcgatctccgacgcgactaaattcgctaagtcagtgttattcatacctcctggtgtagagattgaggaactaacagatgatatggttcttccgggttcaaatatcgtaatcggaccttttgcgggtcattcacaaatcaaagaagttgaatttgttaaaagtagtgctcgtgctagagattgtcctaaagatgatcgtcctgagattgcgattttgggtcgttctaatgttggcaagtcttcgcttatcaattgtttggttcgtaagaaagaagttgctcttacttctaagaaacctggtttgtgtttttattcctttcaatttggttataaaaatcgaaccttttaagttttggaaatctgaaagtttggatttttatttggtgaaacagggaagactcagcttataaatcacttcttggtgaataagagttggtacattgtggatttgcctggttatgggtatgtgttttgatctcttgcttttggataaaacaatcagttttctttggctaaatttggtatatttcagttcattttggtaaaatttaggataagagttcggtatttttggtttggtagttcgattggcttagttctgaactggtacatttggataaaatttcagtttagtatagtctattagtaattttacttaaacttagaattaagttttggtaaatttagtaaggtggttccgaaccgaaccggttgagttggctaactcggtttgaactgatacatagtggatttggatatgtatttgttgatatcttgctttcagataaacgttattattgtttgatgttgagaatatatttgcagatttgctaaagtttcagatgctgcgaaaacagattggtctgcgtttactaaaggttacttcttgaatagagacagtcttgtttgtgttctacttctcatcgatgcaagtgttcctcctcagaagattgatcttgattgtgctaattggcttggtcgcaacaatgtatgtggtaccaattctggcttttgtgtgttcagtgaaatgttgctttgaggacttgttaaatgacgtttttcgatgatttttcaggtaccgatgactttcgtgtttacgaaatgcgataaaatgaaagcaacgaaagggaaaagacctgatgagaacattaaagctttccaacaaatcattagagagaattttaaagtacatcctccttggattttgacgagtagtgtatctggtttaggcagagacgagcttcttcttcacatgtcgcagctgagaaactactgggatcaataggtagcgcgtaaatttcgtaaacaaatgttcgaaaaggtcggttttgaatcattggttatatcaaattgtagttttgtaatgtaacagtaacttttgtatttaaagataagatcataaagtgttactactacagttctaattctgatgaaacaaattcatgaattgccgaaaaattggcaagaatagcttctttcttgctaccatcttgatagattagcaggactaagcagagggaaagcttcccagaaccgagatgacgaaggtgaaagatcaaacgcgaacggattatccttagctgttgttgtatcatcagaaatcttgactggtttagcttcaacttgatgtacctcttgctcaacgtcttctgcaccagttagcctctgaactaactccttgaagttaacaggctcgactctgtaaactttaggatgcatcctctgaggcaagcccgttacgggttttttccatggctttgccggttgcttacgggtcgaatgaagtgaggagttatgagagaaacatggttgtgaagtagcttccatgacgatcagaagtttctgtaatacacaaatgatttgaagcgaagtgtcttaccttgatggctttgtgtgtacacatataagtatttataagtgtgtggacggcattattatgtcaacgttttgaagcgtgtaagtcattttgggttttatgatcttcttttgcggcttacttggtttttgacttttaagtgaaatgaatgggaacgagatgggatgattcatggaattgaaatgtcaacgtgggtgtgctaactatttttattttcttgtttatttaaatgttaggtgaaaagcaatgagtacatttttggattaacgtagtttttgttaaaaaataatctagatgacatggcaacggtgtcattagtaacatggcattcatgtcatcattatcatcaaatatgtggtatctaacgtcagcagaatatataattttgcatataatttgataaattaggtatgtaatttaattttatttaaaagattaagtatatattaacgcataagaaattattagatataaattaaacatttgaactttggttgggtggtatgaaataaggttgtgccttaattagttaccttccgttaggatcctgaaaactgtttaggtccacaactacacaatataacaagcaaacaaaacttttgcttccgagtgtcagagtaaaagcaataatgtaaagagatatctcgataagtgatgagactcaattatccgcatagaaaaaaaaaatatgtataacggagaaagatatcctatctacaaaccttgaatatcactttccatacaatgcaaacattttagaaattgttacatttacccaaaaatgatatattaaacttatcaaatctatcacaattgtgatctacatgtttttaagtaaaagaaaacatttggtttttgacatattatatcttaaactaaatataaattaatctcgaagccgcggctaaaaaatcgagtttttcccacttaaagcgaagaatatagctaaaagtgacggctaacatttggatatgtcggtttcttccgtcattcgtagtttggctcggtccatgacctcggtctcaccccaagttggatatacaacaccatctccattgccttaaagacattgctttcatccaaaaccttgttccacaccccactcactacgcagtaattgttgttatacggtgctcggtgatgattcatgtgatgtatccgtgaaacaagaagcccaatgtcttgcaacccaaccacaagaggtggaagcttgctcttcgttccatgagcccaagcatggaacaactgacaaaacaatacacaaaatgcaaacatgcttacaaagccatgaaccacatggtcatcaaaagcaaggtctagtgggagaactatcaaggttgtgcctcgagccataaaatgtagattgtttgcaaattgccgtttggtgattgtccatggacacttgtgatgatcttgagagtcttcgatatggattcctactagaggcgtagactcatcaccgtagttatcggtggcccagtggtacacaccagaacctagatctgctaagatatacccggcgaaaccggctaaagatggttcgagccagagatgagaaccaaatgctccaatgattgatttggaaaaagagacaaacacggtggtgcagccagctgcaacccataaccggtgagtccatgtagattgtagagttgggtcgttggagagaggaggattcacaagtcgttgctcaacaacaagcttcatctcatggttaggctgagagttggtggtggaagtgacacggagaaacgatggacggtggcttcttgggatgttgtttgtgatgggatttagagtgtatttggtttgaagagatgtagccattgaagcagagtatgtgatgtctgaaaagatatatcaagtttcttgtttttttttccaaagctaaataaaacaaggatatgtttttttttgtgacaggataaaaaaatcatttaaaagagataattttgaccaaagaaagtaagagagtattgagataataacattcaaagaaaatctcaaaaaatttggattaatttatgaagttaccaactaaaacctaacattaaaaagtattattaaacccaaaattactcgttaatacagatttctatatatatttattttttctttagagaaaactttaggaataaaaaaacatttacttggagatgcgttaaaacaaaaataaaatattcacttggtttagagatatgaattgggtatataatcaaggaaatatcaaccaccatcaaaggaaccaaatcaccaaaagcatatagagttcttcataaccacacacacacatattaggatgacaagctaatccaatacattatctctggttttgattaggaagaagattttaaatgcattttccaagaatcccataaataagttcaagtgccaccaaaggcgttttattacaaaccataaaatagaagattacaaacacaaaagaggttcgtgtataactcatatgacatatttcattacaaacataaatgtttcccatataattggagaaattgtgagagatgtgttcaacaagtacttacggtgactactctacttgtttccacaacacttagttcgtgaaccacaataatatgtccaatcaccaatctcactcagcataaattactatggaaaaaacaaattcttaaaattacctctaattattgtttactttatctcgtttgccctacatactacaataatatttcaatcaaataaaccaataatcattgaattattcaaaaagattccgcattataaacctttcacttcatggattataataatcaactcattataaaagcacatctaaagagtttataaaacaacaaaacacaattatttcaccaaggctcatcaggataatcgaacggtacaggttgaagaggggaagtcttgcctagatccgagtgtacgaaaccatatttacgcatcacttgattatcagcgaaattaatggctttgatcatcccattccaacacgtgtcaccatcgtacatcttgttatgatcaccactacaaggttgacatcccgtaaaatgcgtcacgaacggtctccgtttgcttcctttcccgcctctttctccttttaaaaaccgttcctcacgaaacgcagcgtatcgttcgctcactttctctgcgtgtcgtctacgcaacgtggcgtcttctctttccatctccagataccgttccgttacgttggataaacccggtacgatctctaaccaatatccttcgaaataaaagtctccttcgaggtatatctttggataatacacttctctgtgtttgtagagtaagtaaagcagagccgtttgatcatctgactctgggaagagtttgtctttgaatattgaccgttggatttgtccccattttgcgtactctggactcactggtcccatacctgcatgagataaatcaaaattttggttaatttgattcagattcagttattttctaaaccaaccaataagaggaaacatgacattcagttactggttcggttaaaaacctcgaaccgagctaaattgaaccgagattaccaaatttttgtcataatttatcgaaaattattgcattatgtcaaaaatgcaccaatatcattgaaatatagtgtaatttaactgaaattaacagaattttgatcatttttatataaatttagtcgaaaatattgaaagataccgaaatattaccttaaatcgaaccaaattcgtcttttataaaccaaaccgagctaaatttaactgaaatgaaaccgaaattctaaattctcatcttaaaccgaaccataattggtttaaaaatatctaaaccaaaccagacaatgcctacttattagggttttaaactatttttaaaaagacaaaacaataagagggcccatacctgtccacgtgtcaatgagttccatagaccactgacaattcctaatgagaaaaactccggcgtttaacgccgtccagctccgatcattataaatcactcccggccaaccatgaacaacaagattatgctccttataccgtcgccacggcggcgtaaaatccatatccgtaaacaaagcatcagaatcaacccaccagatccactccgcctcaggatgagcaatcatcgccgctttaaccgccggaagtttcgcccaataagaattcatcttcggatgaagaagagcgttactatagaatatatcatgaccatggatccgacaataatcaactttgttcttaaaaaatcgaagcaacaaatgatctccgattgggtttttacacggcgcagattgtgatcctgttaccataaccgtacgattctcagctccggggataaacgaagggtgtagatttaaccaacgtcttcgtttctcgtcccagtttttaaccggtttttcgattgtgtaggttagatccgggtcgtcgtagtaaaccgggtcggttggatcttggctcatatcgattcctgaagaacatttgttggaggattcttcgtttttcacggtgagatttggggagattgaagagaaggagaagaaagaccagacgaggattagtgacatgaaagctccgccaaggaagagaacgacgtcggagatacatacaaccggtctggttcttgttccggcgtattttgccattggagatgattggtaatgtgatgatgatgtctcaggcgagaccattaacagaatcttagagatgattacaaaaaattcaaaattttgggaactttgttgtataaaggcaataacttatttttttgtttttctatatgtaacattaatgtcccattaatcactcgctcgatatattactttatttgtatcagatttttatttgacgtaattgtgtttgtgaaaagtaaatgttgtcaaaaaattgaaattgaagtgtactcacattaatagttttcgtgtttcgattggtaggtttataactgctagagataaggtttttatatgtcagaattgtcatgtgatagtgcttttgttctggtagagaaacttgaacaacgtgagtgtgacgaaccggaccggtttgtttcaccgacactgattgtaaaataagattggtgttggtttctacgtgtcggtaagccggtgttccggttaagcaagggcacgtgagtttgctgcgataattttagggtgcagaagattactatctcacccgcaatttcagcttttaatgttgaaaattgcactgctttaagtttattttattttattttatttgagttgggtgttttataattgaaaataactactatattggaccgatatactaaagaaaaactctaaaagctagcttaagaaattttatattgatgacagtcacgaagagcgcatctttatgcccatcacaattaatgaggaggcacaatatacgaagccattatacaaaaatatttaatattcaatttcggtaaagattaaaacttagtatatgattaaagctactcaaaccgacaaacatttacatagtccaagcctttaacgtggatcaggattagatcttaagaagagtcagattgaatctatgtcatgaatatgtatatagtacgtagttatatccctaatgcatagtcataggcatttgatatcataaaagtataacacagatcgtatagaattataaacactaactaataactttaacgtcacgatcctactttttttatatttcctagaaaaggatgataattagccatgttcatcaacgctagtaaataccgacaatagataggttgacaaaatcgtgaagaatatgacgcaagtatagttttcggaaacactaacataaaaaaactgtcgcccaaaagtaccagtaatagtaccaattcacttgccttagttaccattatcaaaaaaccgtggtattgtcatctgtgattatgcaattggataatgttgatattctacaagagttagcgagtctagcaagttctcatattggagacgggtttttgtttccgtttgcatgcaacctagatttttttaatagtaaaatgtggtatttatatttatatttaaaaaaatattattttgtctaaagaaaatcaaatatggagctatatatgatatctgattcggaaaacttttttttttttgtatgaaagttacgtttataccgttttcatacagaattttaggaaaaatgatagaagaaaaagactgaaaactataagaaaggaaacaaagcaaagaaaaacggaaaatgctttaccaaaacatgtcattattgtttctaagagagagaatcttttaaaagaaacgactataaagagattccattacgcacacctgacaccaccaactccaaggcaggcaccaaccattgagaaaataacaaattgtaacttttgcctttcttaactcatttggtttagcatttggaaggaagtgataatcgcgaggtttgagatatttatatccaaaagacgcgatatagtctcttcttgggttttgtatttgttccttagttctttgcttcgacatccgatattcatatagcacaatcaaatcaaacaggcttagattttctagcaaaagtaacgttaacctttggttaaaggttgtcttcggttattgaataaaccaactgagatctcggttaacttgaactgaactgggattggtggcattagagtttttagatggattttggatagtatatgggctcgactctagaagctgggccaagttggttataacttgcaacataattgggaagaatatcagttggactacacttcactattagtgatgagtagaaaaatattggtttagtacagtttttacgttggttagatcaagagttaattgttggtgtagattagagatcaaggtcattagaaattgaacatggatccctaatctttataacaaaatataattaagagatcaattttcaagctctagttacttttttctatttttcttatctttatcaaatgaaaccatatagtagattgtttttgtttggaatgcgttttcaatattagtccaattatattttttagtccaattaaccaacaaaatgtctgtaatattagaccccaaaaaaaggggaaatacatttttattaaatacaaaagttttttaaattattaaactacatgaatttagatatttgtaacttataagtattccataattatccgatggtagaaaaatcatatgagattctattttcatctaatcatctggctttcaaatagacacccattatcacaataaccatccaaattgaatctcttatcgctctattatctcattacacattttcttataattttctcatattctctttttttgtctaattataattatttgtttcattgatttatcacaagagtcttcgaacaagagaaagaaaaagaatcccattttttaatactaaagtcaatcacctatcatttgattttgatcttgtacaaaataaatggcaaattgcagaactccacgaccgtgcgttggcaagctcagccgcggcgtggtttgggaaaactccgattttcggtctgaacctccaggttcttggggatgtccgaagcaaatgagacacaatcacgtgtcttcttcgacaacggagcatcaacgacgaagctggaccaacgctaacggtaaagaaacaaagagccattccaattttgcagactctggtgggattgttgcggtggaggaagcggagttagtggcagtgttgagggaggctcatccgtacgtgaatttacatagagacagtaaatttgtcgttatgttgtcggctgagctacttgactccggttcgaccctcgacggcattctcaaggtcattactatttactcttttcacattactagattccaaaaaagacaaaacgcgtgactcgtgagcaagaaatgcatcactcaaataatttctaaaataatatcatagtaatgactaataatactttatacataccacaatgttgtcctcagtttttttataccgttattaattattcccatatcgtgtgtagtagtgttttctaatcattacatttttcttttgggcatcgtattattacttgaattattgtactcaaagtaggaatattgttgacccaaaagaaaacgaatagtatataacacgtttgcaatgcatttcactgctttacgaaattaaccaatccgaaaatggtaataattcaaattcaacatcaaaggtgggccgtgacgttgtatattttttgcaagtctcttgtctctgctcctgaacagagacaaagtgcaaataccggttcacgagtgtcaatcaaaccgacaatttaaccatgctcaatttttcaagaaccgaaattaaatacacgcgtccaccgtcccacactaagctccttcgtccgaatacttttcttcttcctccaccgatcatccgccattgttacccaattttgctctgaattctattaaatctcatcggaattattcaaattccttccataaatttcgaaatgacagagcgtggagctatggtggtatcgtcttctacctgttacgttccttttcgatgtcctcaagcaagaaaagattttgctttcgtcgagccgagtaagaagctaaaccctaatcgtgtattgataaagcctccggtttacacgtattctccggcactgacggcggcgaaatgtaacatttttgattacgcggaaactggtgagaatttggtcggcgataagcaatttgtgcggtggtttcgtgaagcttggccttatttgtgggctcatcgtagctgtaccttcgtcgttactatctccggcgatgtcttagacggcccttattgtgatctcgttttaaaggcacatacttattctttatcgttcagtgtttggtttatgcacgcaaggtgtttgattgtttgtcttgctttaaacttgaacatgtaatttgtatttctatagtgcgtatcgtcttattgattcatctgcaactatgtagctttgagtgtgcgagaggaagctagtttatgaccagtgtgctttagatttacattcttgttcagaggattccaaagtgaaatcattataacatgtgtgcaggacatagcatttcttcatcatctgggcattaagtttgttctagttcctggaactcaagtgcaaatcgaccagcttctagctgagagaggtcagaaaaaattaaccttgccacttgtcttcttattggcttgtttagatatatatgaagttgcaaccttattgtgaaaaatagggaatggtttgtcatcagttagtgatgccgaagttgcaaccttattgtgataaatatgaatatttgagcttgttcagatggagcctaaaggtgtgtgagtttcaggacgcgagcctacatatgtaggtcgttacagagtcacagactcagcatctcttcaggctgctaaggaagctgcgggagcaatatctgtaatgattgaggccaaactatctcccggaccttctatttacaatatacgccgacatggtgatagtagtcgtttgcatgaaacaggcgttagggtcgatactggtaacttctttgcagcaaaggtgagtttttcactttgttgatatgttaggttggatgtagattcttgtcatgttcgatctaattaattgtcatggcagagaagaggtgttgttgatggtgttgattttggagcaactggtttagtgaagaagatagatgtagatcgaatccgtgagaggcttgatagtggttctgtagttttattgaggaacttgggccattccagcaccggagaagtcttaaattgcaagtatgctctctttattggtaataatttacttgctaaatcttgacgacattaggtttttgtcaccctgatattgggacattacttctacactgcagtacctatgaggttgctacagcatgtgctttagctataggagcagataagcttatttgcataatggatggtccagttcttgatgagaatggacatcttgttcggttcttgactcttcaggaagcagatacattagtcagaaaacgggcacagcaaagcgagatcgctgccaattacgtgaaggctgttggggatggaggcataagtagttttcctgaacctcttggttacaatggtatggtgacgactcccaacaatcatattgggagaccgatttgggaaaaactcagtccgacctttcagaatggtgttggatttgacaacggaaatgggttgtggtctggggagcaaggttttgctattggcggtgaggagagaattagccgtttgaatggatatctctctgaactggctgcagcagcgttcgtttgcagagtgagtccttgagctaacccttgtgcctcttttttacatccagctctgattcgttgatttgttgaagggtggtgtcaaaagagttcacttattggatggtactataagtggagtgctattgttggagcttttcaaaagagatggaatggggactatggtggcaaggtatacacaactgttttcactttcgaatcatgcaaagttttgatttttcttacaaaactatggaccattcttgtcacagtgatgtatatgaaggaaaccgggaggcgaaagtggaagatcttgctggaataagacaaataatcaaacccctggaagaatctggggctttagttcgtagaactgatgaggaggtttgccttttagccatatcactagcttagattctacttctttttgtttaggtgttagcatcaaaggataattggtttttggtattcagcttctgcgagctttggattcgtttgtggttgtggaaagggaaggacatattatcgcttgcgcggctttgttccctttctttgaagaaaaatgtggagaagttgcagctatcgcagttgcatcagattgccgtggacaaggccagggagataaattgctcggtataatcacaaaacttttgagcattgtgtttcgaatctactggtaagaaaaaccccggtttcttgactgtgaaattttgcagattacattgagaagaaagcgtcagctcttggacttgagatgctatttctgctgacaacgagaaccgcggactggtttgtgagacgcgggtttcaggaatgtccaatcgagatgataccagaggcaagacgggaaagaatcaatctttcgaggagatcaaagtattacatgaagaagctgttgccagacaggagtggaatttctgttgttcgaacatttcagtatgattcttgagagtgtccagaagcagaaaattcaaacatagagcaaataaaatgtaattgacacagaaacatttagctgaatctctaagattctgctgagttttgaatcaatattttcaggaacagtgaacgagacaaatgtctttccaacgctatagtggcatctatcgatcgctttgagcttctccacgaacgattcctttgcttccgtcttctcctatgttgtcttgatctcgtgcagagaccgtcgtctactctttgtattgaatacactttgccttcaactgctttgtcttctgtttggttcaacttatataaatgcgaacctataaaatgaaaacaattctgtgtgatattgtgaagaagaaatagtttgatcagaatcctcaaagccgacaagaatccgtcgaaatcgcggtttgacttcccggagaattttccagataacaagaaagaaagtacactttcctggaaagaaaaacaaaatcataaacataacttttgagctcgttcaaattgaatcagttcacaaaacaaacccacattcacttgaaactcaccaagtgattgacgcaagcttggttttaatttcttctttcgtcagtttacaatccgatgcagctaatattgcagcagtagaatattaatatacaatcaaatttatcacttatactgtatatgatcccaattctaaatgtgatcagcaaagctctattattggtagtatatatgtgtatattcattagtggagactggagagtgggtgagtaaaataaacgatatgactagtacctcgcaaaacatgacgaaacctctattattacaaagatccttgtttcctatatgaggactttaatttttgatttattaaggtattaattcatccaaagttattttaaagatcctcaattttttttttttttttttttggtagttagatcctcaatatataacctactccttttcttttgtcgaaaatataacctactcctacatttgacgtcaggaaacctctattattgataatatatggtcctacatatgactatagtacaataaaacgccatcaaacgtctattattggtaattaattaagtaattaacttcttttttttgggataaaaattaaagatccttgtttcctaagatgactcgatctttagaaactaagagagaatgaaactaacactaaaattcctacaaaaaaaaaatgaaatcaacaccaaaattgctgcttttacttctgtttatcataaatcatcatgttgattcgggctctatcgtcaagtttcttcccggctttgaaggccctcttcctttcgaactcgaaaccgggtttgttaaatctctcttttaaaaataatgtgttttgagtttggagttataagtatttagtccttcttctgaatgaaggtacattggtattggtgaggaagaggatgtgcaattgttctactactttataaagtctgagagaaatccaaaagaagaccctcttcttctctggttaagtggaggacctgggtgttcttctatcactggccttcttttcgagaatggtaatcttcttcttttttttgctcttgctctaaggattattttcaaaggcttgcttaaagtgggttaaaaatatattaggacccttggctttgaagtccaaggtttacaatggaagtgtcccttctttggtctccactacatattcgtggacaaaggtagaagaaagtatgttcatatgttaatgaaaaaacacaatgatctatcaatattttttgattatttattcagacggcgaacataatattcttggatcagcctattggagctggcttctcctactcaagaatcccacttattgatacgcctagtgacacaggcgaagttaagaatatccatgagtttctccaaaaggtaaaaaacgtaacttaatttgtcatctcaaagcacttatctgttttactatttttttttattattatactagataaggtacatctaaataggtgttgtaagatatataaattttatcgatattatttgatttttgaatagtaaagcagtaatttatacattaaaaaaatattttaaccgtcacatataattctaaaattataaagatggtgttcaatttctcgtctccaaagttttgatttaatatattatttttcaaaaaaaataaattttgataatagtgaaaaaggtatattgcgtattatttttgattgtatatgattattctgcatttctaggatatgaaagataaagttacaataatcagcaactttgaggactgttttgcataaaatccattaatttacttcccaaattaaacaccaacctaaaagagttttttttttttttccagtggttaagcaagcatccacagttttcttccaatcctttctatgctagcggagattcttattccggtatgattgttccagccctcgttcaagaaatttcgaaaggtatctttgtatacttctctttgaatatcgtttagcgtattatctcctactttaaaataacgtagacactatatatgatgcaggaaattatatatgttgcaaacctcctataaatctacaggtagttgatctttaaatgctcgtggtaatatccgaagaatattgattattaaaaagttctgatcaaatattattcggatagttttttgtacactagaaattgatagttatgtaccgacaaactaaaagagatagatagttgtgttatatacataatataattcttttgctaagttgataattatatgtattcttaccaaaatcagggctatatactcgggaacccaataacatattttgaagtcgaccaaaactatcgcattccattttctcatggaatggcacttatttcagatgaactatacgaggtatggaatatatggaatgctcaattagtaaaaaatgtcgtttgagagttttatattcgactagtctagttatccatgacatatttcaaaactctaaatgatataacaatttatgttttattcttgttttaacagtcaattaggagagactgcaaaggaaattatttcaacgtggatccacgtaacacaaaatgtttgaaacttgttgaagaataccataaggtacacactctgagatatggtcaatgttcggtcacttatcacatagtgattatttttttttcccacctcacatagtgatcatctaattcaaattttgcttttttttccttaaacttatagtgtaccgacgaactaaatgaattcaatatattatcaccagattgcgacacgacatctcctgattgctttgtaagtaatatatctttctccatatagtgacaaaagatcagagtattttatatgcttattttgtctaaggcaacaaaacaaattgtcattaaaatactacttcctactccaagaaacgtagtttcaaggttgcttgtgcagttatatccatattatctccttggctactggatcaacgacgagagcgttcgcgatgctcttcatgttaataaggtatacgattattattttaaaatctgaaatatttataatgcgtgatgataataaagaaaataaacctaaaaatgtaaaatatggacgctttatgaatacagagcagtattggaaaatgggagcgatgtacttatcaaaatagaatcccatacaacaaagacatcaataacagcataccataccatatgaataacagtattagtggctaccgatctctcatctacaggtaagagttagatacctatatctaatgtcataagaacctgatcaaaatattcattatcagtgacatcgagccaaaccaaatcgaatgaaaccaaaatttgttcttatttttactttgagaccgaaaaaggaaaccaaaactggtttagtgaaatgaatagaaaaaaactaaaccgaataaacaagaatttactacaattttaggcacatccatattacgtaaataccaaatttaccaaaaatgttttgttaagtatcatatagccaaagtccaaagatattgactctacctgttcactctcaaagggtagttacgtctagagtgagaaattgacccgcaatccactagaagcaaaatcaaattaccagtagattttatttggtttagttctctcaaatatataaaaataataatattgaaaccaaaaccttaatccatagtgtgcattcctatacgtacaaattgtaagaaaatataatattgtcgcggttatgatgaacagtggtgatcatgatttggtggttcctttccttgcaactcaagcctggataaaatctctaaattactccatcattcatgaatggagaccttggatgattaaagatcaaatcgctgggtatataatatatttttgtgttgtaggtttctcttgttcattcattttctcatcgtatctcaaagcttataaaactccccaaaaaatcactcatgccattttttttcttaacagatacacgagaacttattccaataagatgacatttgctactgtcaaagcaagtcttctttcaaaaacatttatattagtcatttcattaaatcaaaattattatattttgtaattgttttgtgtgttttcattacagggaagtgggcacacagcagagtataaaccaaacgagacttttatcatgtttcaaaggtggattagtggtcatgacctttaacttaaaggctttaagtatttggaataccctctttttgtttatattattgaaaaataccctttctttatttctctttcaaaaactatttttaaatatgtaaaattacttgaatgaccttacctaaatttaataacaattaatataaaatatttatatttaatatcaaatcaatttattggtaataattaaaaatttcatttttacaaagttcttatataactaaaaattccaaactttattatctctacagtatttttttttaagtaaattttcattctgacaagaaatattgttcataaaaatttaattggatcgggttatatttaacacgactcttccacaaatatttttgcttaaaagtcggatacaaatattaccaaaattggattgtgtctactaattatgtttctatattttataataacaatatgtagaagatttggttctgatttaaatttatgattctcttttcatatttgtttgatatttttttaactactttgaagaatcatatagtatataaacttccaaaaaccccaatttttctgtatatattatgattcacaattttaaaaacggtactatattacccaattaatgaaaaaatatgttcaacgtcacacatcatctataatgtttagacaatgattcaaaagtcacattataaataagatcaaagtaaatccaagtccaaatgagcatgaaccttcacttaacaagcattaaaatttacaagtttgtatacgggttagtttaggttttagttaaactgtttcattttaccataaatattaagatagatatatttggaagcaatagaaagtttataatattatgaacatataaaaataaaaaattacacgggaaaaattatattgagggacgaggttttatgatggcttaacggaactggttttgaagcaacattaatataaattttaaaatatcattaacctgtttctccaatatgggacatattaaaatcaatcaaattttaataatattatgaatatttgaacatattaaaaaagagagcacatgacaaattataatgcgagacgtgttatatggcaggacacttttaaattaataaaaattttaaatatcattaactacatttcaataagagttaaactctcatatattattttttaacacagtgataactagacatatcgaatcaacctgatttaaatacgattgtataaataaaaattattttgtggtataccattgcttaataataattgtaaactataaatttaaatttcttataaaataatactattataaaattttatatagaacacataatcattaaatatttataaattactatttttaacaaataaatcgtccccgcaaaaattaattaacgtgtttttggaagaagaataaaagcaaaaaaaacacctctaaatgaactttgagactgattaggtgggataggttagtgagggattaggtgaatcaatcaacgtgttaaatgagtaaatgacgctgtccttttcgatagattaactttcttttgttttgttctcgtttgttagatgtttatggtattaagaagtaaatgcttcttgtgaaaccgataaatgtttcttcactgaaacacccttaaatggacgaaggaaaaacaaaacaaagaagtacatgcttcttataatcttatgaaaccgataaaaccaaaagaaaattatactccttcagaaaaatgatttcctgagtttttcaccaaaattaaggaaataataaatggtgcattaattaattatttgtgtaaaatcttgtaatttttagtagttttttactccgcttctattcaaaagtaaaataaaaataaaaatgcacccttaaatatacttttaaattcagttttgtttttaaaaaaaaaaagtaaaatctgctttaaatatactataaggaatcaatctttttgatacaagaataaaatctcagaaaaatcattttttatatacaagggagtaattaattattattagctcgattttagtggaattcgtcttcacgatattctcttaattaatatcatttttttctgacacctgttcgtcttggctgtcttgtgacttatttcttgtagtgaataattggatttgttctcttgatgacttgttttttgtagttattctacttataattagctattttattttcttctgacacatgtgcttcacctaaccaatctccaagatcataataagggcgttttagtgcacaactattaacgcaagagaccaaggaaaaaaaaaacagatacttcattttgagttcttgaatacttgttttatcttgttttcgttttttacaatttgggaaaggaaatggagccaacgttccatgcttttatgtttccctggtttgcttttggtcatatgattccttttctacatcttgcaaacaaactagctgagaaaggtcatcaaatcactttcttgctacctaagaaagcccaaaaacagttggaacatcacaatctgttcccagacagtattgtctttcaccctctcacaatccctcatgtcaatggcctccctgctggtgctgagacaacctcggatatctcaatctcgatggacaacttactgtcggaagccttggatctcactcgcgatcaggttgaagctgcggttcgtgctctgagaccggacttgatcttttttgattttgctcattggattccagaaattgccaaagagcatatgatcaagagtgtgagttacatgatagtatctgcaacaacaatagcttatacatttgcccctggtggtgtattaggtgttcccccaccaggttatccttcatcaaaggtgttgtaccgtgaaaacgatgctcatgccttagcaaccttatctatcttctacaagagactttatcatcagatcactacaggttttaagagctgtgacatcattgcattgaggacatgtaatgaaatcgaaggtaaattctgcgactatatatcaagtcaataccataagaaggttctcttgactggtccaatgctccctgagcaagacacaagtaaaccactagaagaacagttgagtcattttctgagcaggttcccaccgaggtcagtggtgttttgtgcacttggtagccagatcgttcttgaaaaggatcaattccaagaactctgcttagggatggagctgacaggtttaccgtttcttatagcggtaaagccaccgagaggatcatcgacggtcgaagaagggttaccagaagggttccaggagcgggtgaaagggcgtggtgtggtttggggaggatgggtgcaacaaccattgatattggatcatccgtcaataggctgctttgtgaaccattgtggtccgggaacaatatgggagtgtcttatgactgattgtcaaatggttttgcttccatttttaggtgatcaagttctcttcacaagattgatgaccgaggaattcaaggtgtctgtagaagtgtcgagagaaaaaacaggatggttttcaaaggagagcttgagcgatgcgatcaagtctgtgatggataaagatagcgacctcggaaagctagtgaggagtaaccacgccaaattgaaggagactcttggtagtcatggattattaactggttacgtggataaatttgtagaggaattgcaagagtatttgatttgaccaatgttgttgattctcacttattttggtaattaattctgaaattatttgttttgtatgattggagacaaataaattgcaagagttctcataagtccggctaaatttccaatgactttgaacactataaaaagtgcatttctatgtcaaaatcgaatttaatttgaatgagaaataagggtccaaagtggttagtttggaagagcttataattcttgtaattttacaaatgagtaaatgtcccaccttggaagcatggatttttttttatttttccactagtgacaccatggagtacgagatggatgagtatgatgcaaaagtacacaagaacttgtcattgttgctatcaagttatacaaatgtaagttttcaaacaatttataatactttctgaagttaattttaaaaacctttaaaatcttatcacaaccttaaccttctaaaaaccttttatagattttacaaattgtttaaaagttttgaaaggttcttacaaagattctaaaatgtttttaagaccttgtaaaatcttgagattatattgttcaaaatgccatttaatttgttggtccaaaatatgtggatatgccaattattgaattggcttgtggatttgccattcttggtgggttggaaagacggtttttacctttagggagatgggcaggagttgtgagttcaaacggtttttgggaaataagtggattagattacaagttcttataagttgtggacaataaacaatctattagttacatatttatttagaaaagagtagtgacttttaattttggtaaaactaaattaacgatcgaaaaaaatgggggaggaaatatgtgttccatcaaatttatactttttcttcatctctaactaatttataggcattttttatggactacattatcttctcgttttttagaaaacaaaatctttatatacaacagttagatgatttttctacatatgtaaagcattcaatcaaaaagaagaaattaaaagtgaaaatggctaaaagtgtaaatgctactggtttcatcacttatatggtgattttcttgattttaacaggtatacattatgatatatgaaatctctttaatttgtgtttgattttctgactaatatgtattcattaatgtttcctatacactgcagtaggaatatcaagagtaaaggctaagaagccaccatgtctagaaggccgaaccgcatatgtgtcacctggtccttgtagtaacagtctatgcacacaagattgcaggcctgctggttatcacactggcaaatgtaaagttgagtggtcaacaccaatttgtaaatgttatggatgcagaaaggtgtagactcggcagatcttatgtgcaataatattattcagtatcatgtttttttggagctgtatcaataataacaagtcaaaaggactttgtagtaacgtgcttctcgaatccagttataaattccaaaatccatcactttgttgttgactagatccaccaaatgttttgcattcaccttcaaaacactcacattgccattaacaaagcttgaatttttctcgctgaaaaaacgaaactcccattgtagttgtgctcaatccattacttcgcaaacatctagtcatttttttctcaggaaaattgttgaaccaaggattcacacaatagatttgtttaaaagaggaaaacaaatctagtaatttctcttcattaggtatttcatacaagactcaattataaaggggattctaatcccttgtgaaacagattagagttttgatcaagaacagagaaagaattaaggtttttagaaggtatagctgcatccatgatggattgcctacgtaccctgtgaaggaatcaagccattcgtagttctcactaggtataaagttatgtgtttcttctgagtatcaaaagatcttccttttgtgaagtccctgaggcgctttatataggccgttaaaccgcctccctagcgatattctcgtaagatttccatttatccttaagtcggttctggaggataatcgtattaaagatattttctttattcttcggaggcttcagaaggatttcttgatccgacattatcttcaaacattctcctttatcatttccgaaagtcccataaaagatcttattttaccggaaatgatcctttgagaatgaatggtttttacaagtctttgcctcaggtgttcttcacggctcggtggtcgtttgagaggtggcttcgagcaaacggtatgtaccggttcggggcgcgcttgatgactgtccattaagctcagttggctgtctccaaagccgatatatatgtttcccgcaccgttttcacgattggctcgggctgtgttcataggattaacatccgagccattttacgaagtctctccaggacggttgatcgaataaggtcccaaggtgctttgttctaggctaggggccaatcatatgtttaaccatgaggtgattgttattcttagactgtttggctcggtcttgcttgtgggggaatccgaccccaacaaaaataatgatcactacttaactagcacaaaaggataagctacatagcctacatagtgtggtcaaaaacacaatctactaattaatcatatttatttcattaattaagtctttattggtaattagaacattcctaaagaaggatttcacaacattaaatatggaatgctgattgaatataatcagggattaactttaaatgcatgcggttttggaggatgtgtttgggtgtagatgtaatcaaggtgagcatccgacgtcgttttcatcaaacattcttctgtttcgcacttcgtctccatctccttcaaacaaacaaaacaaatttgttaaattctacttcatttccttcaaacatttcattatgtttcacaagcatttagtttagtttggtttgttagaaaagccagaaccaaactctccatagatgcaatattcttcgactactataaaatttaacttatttagatttgtaaaactagtaagagttttacgcaatcatttcaaaattgtttaaacgtaaaactcgaacataaaagaataagtagatgataacatgtaacttgatggttcgtgctagtgaatataattagggattaactttaggtgcacgcggaggaggattttgggtatagatgtaatcgaggtgagcatccgatgtcgttttcatcaaacactcatcggtttcacagttcttctctatctccttcatacaattaaaagaatttttattaatttataaccatatagataattaaatgtaattcattaaaatggtctcttcgaaattaaacattcaacaatttggttttgctagaatgagtatttaccgttgatttgctctggagagtcgagtccggacgagccactgaagcaagaaccacggagctaagtaaaactgctgcaacgataagaatgttaatctttgacataatatcttcttcctcaataatcctttctctctttctttttttttggtttgtaatatatagagagattgttacaggagaagaatcaaattacaaggcaaaattaggtaagacttttggagcaagatagttttccttttggaataagatttgtttccttttaaaattaaatttccaaaacattttatttttgttactcattactcattagacaatctttccacgtctctcttgttgcatgtttgtaacgcttacttatagaaatgaatattccttactttgttacaagaaaaacaaatccttagttgacttccattagctatttaatgttgaggaaatgcttttgacttagttaaaaccttaatatataccttgcatataaaaatcactgatcctttgattatagagaaattcttaagataacattaaaacaaattttattgacaattctaccacacacttcataaatttccaaaatatcattaattcacacaatattaaggtggtatttaagagatttttcttttatttgaggcgattttgatattttctatttttctattttcattgatttgatgtatagttactatttaaagtcttatttgtgaaattttacaaatgttggaaaaaagcattttatggtgctatatttgtcaatttcccttgattatatatccttttgaaaagtaatgttttttttatgtgtgtgtattcatgaaccttggaaaaactacaaatcagatcatggtttgttttaggtgaaaaatttagaacacagttacgcaagaaagatatcggtaaatttttgtttctttgaatcgaaattaatcaaaaagtattttccattatataacaacaactaatctctgttttttttttttttttttaacaactaatctcttatcaaaatgacactacagaatcacgattgtaaatctttaaaaggcagtctgaaaaatattcatgaggatgagattttattcattcatggttgtaagtaatcattatgtaaagtttaggataaggacgttcaaaatcatataaaaaaactctacgaataaagtttatagtctatcatattgattcatatttcatagaaagttactggaaaacattacacaagtattctcgatttttacgagtttgtttagtagtcgcaaaattttattttacttttgagtatacgaacccataagctgattttctttccaagttccaataatgatatcatagtgtactcttcatgaatgtttcaagcatataattataacgttcataagtaatattctactgcatgtttgttattataaattaactaataatcgaacgtatgagttttgattgagattgttgtgctcacgaaatgaaggactcggtcaattctaaagcttaaaataagaagctcagatcttaaaactcgctttcgtcttcgtcctccatttaagtttgcgattcttttgctcttctttctctctcacatttttgtcccaaaacaataaaaagaaacaataatagaaagtgttacagaaaaagaaagaaaactatcattgaagttgggaaggagaaatggagagttacctcaactcgaatttcgacgttaaggcgaagcattcgtcggaggaagtgctagaaaaatggcggaatctttgcagtgtcgtcaagaacccgaaacgtcggtttcgattcactgccaatctctccaaacgttacgaagctgctgccatgcgccgcaccaaccaggtcctccttctttttatgtctcttgatcagcacctaccttgtatagcaatctaacttctaaagccgtttacctaatattttccctcccaaattatttgaaaattttcaatgtatatataggagaaattaaggattgcagttctcgtgtcaaaagccgcatttcaatttatctctggtgagttattaatctgagaaaaaggaaacttcaaatcttaatttttgcatttctgtaagaaagtgttctgttcttgatttcaaaaaatgtggtttttttttttttaggtgtttctccaagtgactacaaggtgcctgaggaagttaaagcagcaggctttgacatttgtgcagacgagttaggatcaatagtggaaggtcatgatgtgaagaagctcaagttccatggtggtgttgatggtctttcaggtaagctcaaggcatgtcccaatgctggtctctcaacaggtgaacctgagcagttaagcaaacgacaagagcttttcggaatcaataagtttgcagagagtgaattacgaagtttctgggtgtttgtttgggaagcacttcaagatatgactcttatgattcttggtgtttgtgctttcgtctctttgattgttgggattgcaactgaaggatggcctcaaggatcgcatgatggtcttggcattgttgctagtattcttttagttgtgtttgtgacagcaactagtgactatagacaatctttgcagttccgggatttggataaagagaagaagaagatcacggttcaagttacgcgaaacgggtttagacaaaagatgtctatatatgatttgctccctggagatgttgttcatcttgctatcggagatcaagtccctgcagatggtcttttcctctcgggattctctgttgttatcgatgaatcgagtttaactggagagagtgagcctgtgatggtgactgcacagaaccctttccttctctctggaaccaaagttcaagatgggtcatgtaagatgttggttacaacagttgggatgagaactcaatggggaaagttaatggcaacacttagtgaaggaggagatgacgaaactccgttgcaggtgaaacttaatggagttgcaaccatcattgggaaaattggtctttccttcgctattgttacctttgcggttttggtacaaggaatgtttatgaggaagctttcattaggccctcattggtggtggtccggagatgatgcattagagcttttggagtattttgctattgctgtcacaattgttgttgttgcggttcctgaaggtttaccattagctgtcacacttagtctcgcgtttgcgatgaagaagatgatgaacgataaagcgcttgttcgccatttagcagcttgtgagacaatgggatctgcaactaccatttgtagtgacaagactggtacattaacaacaaatcacatgactgttgtgaaatcttgcatttgtatgaatgttcaagatgtagctagcaaaagttctagtttacaatctgatatccctgaagctgccttgaaactacttctccagttgatttttaataataccggtggagaagttgttgtgaacgaacgtggcaagactgagatattggggacaccaacagagactgctatattggagttaggactatctcttggaggtaagtttcaagaagagagacaatctaacaaagttattaaagttgagccttttaactcaacaaagaaaagaatgggagtagtcattgagctgcctgaaggaggacgcattcgcgctcacacgaaaggagcttcagagatagttttagcggcttgtgataaagtcatcaactcaagtggtgaagttgttccgcttgatgatgaatccatcaagttcttgaatgttacaatcgatgagtttgcaaatgaagctcttcgtactctttgccttgcttatatggatatcgaaagcgggttttcggctgatgaaggtattccggaaaaagggtttacatgcatagggattgttggtatcaaagaccctgttcgtcctggagttcgggagtccgtggaactttgtcgccgtgcgggtattatggtgagaatggttacaggagataacattaacaccgcaaaggctattgctagagaatgtggaattctcactgatgatggtatagcaattgaaggtcctgtgtttagagagaagaaccaagaagagatgcttgaactcattcccaagattcaggtaacttttcaagatttagatattttttgctttcttgataagtctttaaaccataacttttttttttcttgacaggtcatggctcgttcttccccaatggacaagcatacactggtgaagcagttgaggactacttttgatgaagttgttgctgtgactggcgacgggacaaacgatgcaccagcgctccacgaggctgacataggattagcaatgggcattgccgggactgaagtgagtatcatatatccaaataagtctaatgttattatgcaaacgactcaaacatttttttaaactcttttaggtagcgaaagagattgcggatgtcatcattctcgacgataacttcagcacaatcgtcaccgtagcgaaatggggacgttctgtttacattaacattcagaaatttgtgcagtttcaactaacagtcaatgttgttgcccttattgttaacttctcttcagcttgcttgactggtaagttaaagaaattagctgattctgtttttattcaaattttcatttttttacaattatattgtcttcgtttctatctttacttttgtttctaaattaattcacaggaagtgctcctctaactgctgttcaactgctttgggttaacatgatcatggacacacttggagctcttgctctagctacagaacctccgaacaacgagctgatgaaacgtatgcctgttggaagaagagggaatttcattaccaatgcgatgtggagaaacatcttaggacaagctgtgtatcaatttattatcatatggattctacaggccaaagggaagtccatgtttggtcttgttggttctgactctactctcgtattgaacacacttatcttcaactgctttgtattctgccaggtaatttataacaatcataagttatactcaaaacacttaaaagtgttaacctacacttgtagattttatggtatgactaacttttgggtggtttgttcttaatgtttcaggttttcaatgaagtaagctcgcgggagatggaagagatcgatgttttcaaaggcatactcgacaactatgttttcgtggttgttattggtgcaacagttttctttcagatcataatcattgagttcttgggcacatttgcaagcaccacacctcttacaatagttcaatggttcttcagcattttcgttggcttcttgggtatgccgatcgctgctggcttgaagaaaatacccgtgtgatcgaagacacaatgctgataacaatctttctcttatataacagaagttcctattgacacattgcaaatttttcacaaagcttgcatttttgcaattttttcctttttgatattgttgactaagtttgagttaaataggctaaggagaattaatatactcatccatttttttttgtttctatgttcttgaaatgaatccatcttgtcaaaaaatcaaaaacaaaaacttggactagtacgagaattgcaaagatatatgattgaagtgatcattaaagaacatagaagaaagtggaccatactgtatttataatcctaagagtgatcatgtggcttttcttgggggagccttaattgtgatccactatcaaaaagattccattcgaattctgtggatcttagttgtggttgaaacataattctgaaaatgactagagttatgaacaagccccttttaaaatacaaggcaaaaaagttagcgactttcatacaaatcagatacttcccatcacaaatcatcaacgaaaaatccaagaaaacagttaactctcaaagaatatcctgattaatttatttaaataaaattataatagaaatgagtaaaactactgtttaaatttatattattaattaattataatacaaaagcaacatgacatatattaaataaaaaaatgcaatgaccgaccaaaaaatacaatgacataaaaatacatacttagtaccaacattgaaaatgcaaaatcaagatttgacaatactacgaaattgtagaagtgtagataaaattagatgtgtagtgattccagttcccaaattctttgatatttttgttaattccaaatttctttaatattgatgtaccaaaatagtaagtgattccaacttcttcaatattgctgcaaggctgcatgcaccgaaatagtaagtgattccaaatttgtttccaaaatagttattgtcaaaaccaaccccgtgtaaggtttggaggtacacacaaaaaatctactcgacgtggagcgaccagtgatcattgaatcaaaaatgcaacctacccactattgttttggtaactaactatattagatcatttttaccataaaatggatttcgaaattaacagagaaaatgagaactttttcacccaagttgctgcttcttcttttacttgttttaagacatcatgctgaatctggctctatcgtcaagtttcttcccggttttgaaggccctcttcctttcgaacttgaaaccgggtttgtataattttctctttttttccttatcaatccaaatatgtgttttagttcgtcgggtaatcataatggagtgaagagagatatttgaagaattgtgtattgttctcataataatgaaggttatgcacttatgcttatgatacatatattcttatagcagaaatatttcttagagttatacaaaaatttcttaatatattcacacaatatttatgataccttttgacatcttctataaatcatttttctgaataaaggtacatcggtattggtgaagaagaaggatattgaatttgagaaaaggaattgatcatggacacacttgtattctgcatgtgatagttttaatcaatatacctttagggattctgaatatcaaactaataaatcatgaaaagaatatcatttcgtttatgttaaaggggttctgaaaagaataccattttagatatttttcaaaactccttaaaagcttacttatgcaccacggcttatgcagggctaccacagtacactagctaaatattgggccaatgacgagagggtacgtgaagctcttcaaataagaaaggtatatgacattaattttgtcgagggaaataaataatgtcaatatcatttaaagatcaatgacacatcatcattagagagcatatgaaaagttaatatatgttcaaccattacttgcatattaaatcagttaatatgaatttattgatataaaaagtcacaaaacaaaaacatataatattttttttgaatctaatccaaaaatatttaaaatgtaaaaaataataatacaagattttaatttattttacatcttcatttcttttctaaatgttttaattatcattcttgccatctcttttatacttcaatttatattaattagttagttacaatgtatatttattgtataggttcgaggaatttgaagtattttctattgtatatggtataagataccaaaggacacaagtctaatcgcatgtgctcttctcgtttggttaaaaatcgctgtgattgtttttttactaaaaatcaagctagatgtcatattaggaactatatgttaataacttcatattgcggccattgttacgtaggtgttggaaatagacatttttgttatacaatcactagacatttttcttcttcatcttttttttttttgacttacatgaatataacttataagttcttacttcataaattagggtcataagagtgagcagatgttgtttgatataactggatatcttctatatatgattacagggaagtataggaaaatggatacgatgtaattcgaatatacattacgatgacgacattattagcagcataccatatcatatgaataacagcatcaacggataccgatctcttatttacaggtttgattaaaattacattttaaagaatcgatctagttctctatacaaactatgcggtttttggtaaacagtggtgatcacgatatggaggtacctttccttgcaactgaagcttggataagatctcttaattatcctattattgatgattggaggccttggataataaacaatcagattgctgggtgaataatttttacaatttttttttttgcttctttattcattaactcagtcgaatcatgagctcattagtcattttgaaatccctcttacgattttcttggacagatacacgatgacctatgccaataagatgacatatgctactatcaaggcaagtttttttttttgttcttactcttaatgttttttattacacaaatcattttgtttctcagtaactgttttgaggggtttactatagggaggtggacacactgcagagtataaaccagcggagagctttatcatgttccaacgatggatcagtggccagcctctgtaataataagagatgatgatgccctatgccaatgaaaaagaaatatttgtagcatcaacttttatatatatatatatatatatatatatatatgtttacaatttaatctactacaatattgtaaaagaagatcatctttaagaaataaaaatatttttaaaatgggctctcaacaaaacaaaactgtgtaagtccaaacgtctcataaataattaatcataatattcatgtctccaatcaaataaacctgagggagatggaagagatcgatgtttccaaaggcatactcgacaactatgctttcgattttatcaaaaaaaaactatatttttgtggatgttataagttttctttcagatcataatcattgagttcttgggcacatttgcaagcaccacacctcttacaatagtccaatgtttcttgagcatatttggcttcttgggcatgccgatcgctgcgggctagaagaaaatacccgtgtgatcgaagacacaatgccgataacaaccttgctcttgtaggacataaattccttgacacatgcaaaagttttacaaagcttttgcctttttgtatatcccctttttattttacattgttgaccaaatttgagtcaaataggctaatgacaattaatctactcatcaattcttttttctttgttcttgaaatgaatccattttatcaagaatgaaaacaaaaatttgaactaaaccgagacttgccgaaaaacggttaagtcatcattaataaacaacgcaggaagtggatcatatttttttttttttaaatgtaaaatttattcatcaaaaaagatcatagttacaattagtctgttcatttcgtcgccgcgggtacctgcggccactaaacaaacagactatatatgcatctatgatcatcttaatgtctttgatgagtttggcttggtatttcggtaattcaccgtgtctccactggttttgttctcgtcagattgtgtagatagtggcttgaaaggcgtatcgcaaaatgaaacaatgggtgcgactaatactagaatctgagattgctttaaggatatcaccaaactggtacgtgtcagttgctgagatatcccatgagtgagcttgtaccaaatctgagacgtgacattacatgagaagaagaggtgatcacgataagaaagtggatcgtattgtatttttttattccatcctctaaaaaagggtcaaatgatcattaaagaacaccgaaaaaaatggatcatattgtattttatataccaacctcttgatattttaatcgtttgactctttttttttttttttttggcaaattgccatcatcgcctaagataaccagttttccaatttttaaaacaattattatactatctttccgtcgataagttgtagtttgtcagatattttgaattgcaaatcttgtttagttaacaaagtcataaactacttttctcaaaatcatctcttcattccttagatccattataaaagtagagcgtgtaacatgaagtagttgtgtgcgtgtaacacgaaacagctacgtaacacaagaagatgttgattataaactaatagtcttgggattataatcttttattaatttatcgatatactaattgttctaaaaaaataatttaggatcgaagaaatatataaatttattaaggtattaattcatccaatatgatttcaaagatcctcaatataacctactcctacatgtgactattcaacaaaacgtctggaaacctctattattgataatatatggtcctacatatgactattcaataaaacgccagcaagcctcaattattggtaattaattaactaattgaactctacatgtgataattatcttttttttttttttttggattaaagatataaagatccttgtatcctaagatgactcaatctttagaaactaagagagaatggaattaacactaaaattgctggttctgcttctgtttatcttaaatcatcatgttggttctggctctatcgtcaagtttcttcccggttttgaaggccctcttcctttcgaacttgaaaccgggtttgttagttctctcttttgcaacaatgtgttttgagtttggagtttgtaattagtcattcttttgactaaaggtacattggtattggtgaggaagaggaagtgcaattgttctattatttcatcaaatctgagagaaatccaaaagaagaccctcttcttctctggttaagtggaggacctggatgttcttctatcactggccttcttttccagaatggtaaatctctattttttgctcttgctttaaggattattttcaaaggattgcttaaagtgggttaaaaaaaaattaagaccttggtttcttgatttcttaggacctttggctttgaagtccgaggtttacaatggaagtgttccttctttggtctctactacatattcgtggactaaggtagaagaaagtatgttcatatgttaaattgttaatgacaaaacacaatgatctatcaaattttttgattatttattcagacggcgaacataatattcttggatcaacctgttggagctggcttctcctactcaagagctccacttattgatacacctactgacacaggagaagttaagaggattcatgagtttctccaaaaggtaaacacgtaacttaatttgtcatctcaaagcatttgtcattttgtctctttgcattaacgcgcttgtgtatgttgtaattcgtgaatacttaataatcccttcgttcggtacggtttaatatttttaacacaaattaataaaaaattaaattatttgttttactaccttttattaatatgttttacaaaaaaaatcattagttaacaaagatatatattttattataaatctatattgaaaatctaaaacgttactttttgtgaaacaaattttaagttagaaaaggacacttcagctaaaatgtatttgaactcactaaaacattttgtttcgtttagccttcaaatcttcccaaattattttaacaccaaccttaagaatttttttttgttcctttttagtggctaagcaagcatccacagttttcttccaaccatttttatgctggcggagattcttattccggtatgattgttccggccctcgttcaagaaatctcgaaaggtatcatcacatacttttatttgaatatcgtttaaccgtgctctttaaaataacacactatgatgcaggaaattatatatgttgcaaccctcctataaatctaaaggtaattgcaatttaaatgctctttgtaatttcgtaagtatattgatttttaaaaagtttcgatcaactaaaaatcactaggatatttttttgtacactagaaactgatagttatgtgtcgacaaaataaaagagattgataattgtgtatatatataatatgtttttgttaagttgataattaatattattcttaccaaaaacagggttatgtactcgggaacccgataacgcacgaagacgacccaaactatcgcattccattttctcatggaatggcactaatttcagatgaactatacgaggtatgaaatatgtggcatgcttaaattcgactagtcttgttatccttggcatttttcacaactctttttaatgttaaaaacattttcttattaaaaaaaagtcaattagggaagcctgcaaaggaaattatttcaatgtggatccacgaaacacaaaatgtttgaaacttgtcgaggaatttcataaggtacacattgcacactttgaaatttggtcgatgttcagtaatttatcagatagtgaacatctaactcagatttgtttttaataaacttacagtgtaccgacaaactaaatgaattccatatactatcaccagattgcgacacggcatctcctgattgctatgtaagtaatatgtcttttctccacctagtgactcttgtaaaagggttggaaaatgaattgatgaagaaacattttttctttttcaactacacattaagtaaaataccgctccatgattaagtcaacaaaaaaaattgcattttatataacttccaagaaacatacttttaaggttgcttttgcagttatatccattttatctcattagcttttgggccaatgacgagagcgtccgcgatgctcttcatgttaataaggtatatgccattaataatgtgtgatgataaaaaagaaaagaagccttaaaatctaaactatggccgattgatgattacagaggagtattggaaaatgggagcgatgtaactatctgagtaaaccatacaacaaagacatcaagagcagcgtaccataccatatgaataacagtgttagtggctaccgatctctcatctacaggtaagagttagatacctatatctaaattattaagaacctgatcaaaaatttcctaattagagactcaagcaaaaccaaattaaatcaaaccaaaatttgttattattttacttttaaacccgaaaaaaggaaacaaaaatgaatagacaagaatttattaaaaatatataggcatatccatattacgtagaaatttaatttacgtaaattattatgtatttatgttttgcaattattattattttatttttttgtgtaaacgcaattatttaacttaaaacaacctaaacaaaccgaattacatcatggtgaaacgaaacaaaccaaattacagatggattttattttgttttactttctcttaattcaatataaaaaatcgatacattaatccacagtgtccattcatacatacaaaatttaagagattccaatattttgcgcggttgatggtgaacagtggtgatcatgatttggtggttcctttccttgcaacacaagcctggataaaatctctaaattactctatcattgatgaatggagaccttggatgattagagatcaaatcactgggtatatatatttttttgtgtttttgggttttcttgttctttcattttctcatcgtatcacaagcttataaagctccggtaaaaatcattcatcctttttttttaattgacagatacacgagaacttattccaataagatgacatttgctactgtcaaagcaagtcttcttgtctcaatttaacatttctatttgtcgtttaattaaaaagtattttctaatttgttttaagcgttttgattgtagggaagtgggcacacagcggagaataaaccacaagagagttttatcatgtttcgaaggtggattaatggccaacctttgtaaaaattacaattatgaattatctactatgtgagctatttgttcctgaggaggtttagaactctaccactagttcgacatgctatagttaccaataaatgaggtcttatttgggtctagggagactacaggccaaagacttggaacttcttggtttattgttatatgttgttaggtaacatttttgtgttattcatagattttaccttttggtacttttatcttctcacagattatattgttctgtgttgtgctgttattttttacaattaaacttagatttttaataaattcttttttgtctcaaatttaataagttatatacctatctccattttactcaacaatattttttagatgaataaaatatttctgattgtgtttttttatctttgcgcgcatttagtactttttctgtattgaaatgtaaaattatattaacaaaaaaaactgactttgcatttagtatcacttttagaggattgaatttgatatccaaatcatatcaatatttaggtaaagatgtggcgaggataagaacaaaataataagagccataaaaccaacgcccctaccttatccattattcatgctgttggggattttgatcttatgtcaaaagtgtataatggtatacagtgagggagagcgacgcatgcaacattataaaatatctattttcataaccaacccgatatggctgctccacaaaagaaaccaggcctacgtaacgtggagctactttgtaattataaagatttattgtttcccataaactggttaaatgattttagaaactaaagtaaaatgagcttgacactagagtttctgcttcttctgattgtacttatcttgagtcaccatgctcattctggctctattgtcaaattccttcctggttttgaaggcccccttccttttgaactcgaaaccgggtttgtaatatctctcttctttttcagcaattcaattatgtgtttggtttcaatttactaatcagtaattttctcaatgaaggtacattggtattggtgaggaagaggaagtgcaattattctactatttcatcaaatctgagaagaatccagaagaagaccctcttcttctatggttaagtggaggacctggatgttcctctcttactggccttctttttgagaatggtatatctataatatttcgctaagcattactagaataacttgtttaaagccgggggaaataaataggaccggtggctttgaagttcgaggtttacaatggaagtgttccatctttggtctctactacatattcatggacaaaggtaaaagtatgttcaaatgtcgatcacaaacccaattatctattcttgatcttattaagaaggacctcctttttttaagatggcgaacataatattcttggatcagccagttggatctggcttctcctattcaagaactccacttgttgataaaattagtgacactggtgaagttaagaggatttatgagtttcttcaaaaggtaataacaaaacgtttattttcttgttgaagcataattctttttcttttgcattaagatcttgtgtatatgttgtaattctcttagtataaaccaattgattgctagtggattcggataccgatctcggcgagatacagaattaataacactgattaaccaaactcattagaaccctcccgttaatttcattacttgccaagatattcaagaatttttattcaaacaaggttttaaacgattgtagtgtttattggtatcctacgagcggttagctctttaatagaaagtctatcttttggtttgtgcagtggttaagcaaacatcaacaatttttttccaaccctttttacgttggtggagattcttattcaggtatgattgttccacccctagttcaagaaatcggaaaaggtatgttcgttaattcatatcaatcaatccccatacacttttcttggaatattgtttaattgtctgtctctcaataattaacaatatatacaatgatgcaggaaattatcaaataaatctacaggttgtagatatttatttgtttcttatattttgttatttaaaaaaatattgaagattaatagtaatatgttcttacgaaaatagggttatatcctcggaaacccgataacagatactgaatctgaacaaaactatcagattccatatgctcatggaatggcattaatctctgatgaactatacaaggtatgaaatagtaatcatgcttaaatttttttctttttttctttttgacaccagatagttttatatttgacgagtccagtcttgttttgattgagtttatagtcaaaagtgttggatgcataaatattggttttaattaaaatatattgttgtaccttttacatagaataagtaaaaatatgtctcatttgtttgttttcttttcttttataggactatacaagtgttcaaatttgattggatgaaatattgttttaaacttatgaaaaaatcaaagtctttaaagttcttaaaccaatcacccctaaccttagtgtttcttaagccttaaatgatagcaatgtttcaatacttcttcttacagtcaatggagagaatctgcaaaggaaattatgtgaaagtggattcacttaacacaaaatgctataaactaatcaaagattatcaaaaggtacacattacggaatgttgttgttattgatcagaactcaatttgataatgatcatcactaattcagatttcttgggttattttcagtgtattcataaactgaataagtatcatatattattacctgactgcgatataacatctcctgattgctttgtaagtaatacttttttcctccatctagtgacccatataaaaggattgggaaaaatatccagcttttatgatattcctaaaaatattaaagaggttgcttttgcagttatataggtatactctcataaccttttgggccaacaacaagagcgttcgcgaagctctgcaagtcaataaggtatatgccaattttagtttaagatcaaaagtgatctattattttataggagactatgtaaatgggttcgacgtgatctattatgttttgcaactttatatataagttgtaaaggtaaagccattccacagttaatacgaaataacatttggccaatggcctccaattctctaaaaatttgaaggagataataaattctttagtttcatgtagctcattctaaataacataattatagaaatttgagttacgggttgatctttgtggtatttagagtgagaaaacacaaggggttttacgataaaacatggacttccaataattgagtaatcaaattcataaaacaaaatatagaacaattgttcatttaaaaacatttagagtaaattttcttaagatacctatttgaagtgtaagagtttttttatataagaattgaagattgtcatccaaactcatggatcatatgtcattgacgattctagtttttgcatctacggatttttttttcaactttattgttgataaaaccttatattttttggagtatctgacaaaaaaaaatattgagtgatttggatatcttatccatcaaaagaaaataagttagaaacgttggttttgaaaactaaaattttgtgaaaaaaacaaaaatttgttttaagactatttttctttttttgctaaatgacgatgatgtttatttctttagatatttgtgtgttttatttctaaaacggctcagaatccatcagttatagtatctctatacataaattttaaaatcttaatgaagatctaaaattgcagggaagtataggaaaatgggtacaatgtaactataaaaatatttcctacaattacgatatcaagagcagcgtcgcataccatatgaagaatagtattgatggctaccgatctcttatctacaagtaagtgttaaatctaaatttttaagaacaggaagtgttctatatacaaccagaagtaggggtgtacaaatttttcaaaaccagagagatcagaattgaattgaactaaccagaatttgtttttaaaaaaagcaaaaaccgaaactgattgtagtgtgtataccaaactaaaacaaatgcaaccaaaatttattagacctatatataattgttttttcatatatacatagtaaatataaacatatgcatattacgtaaataatatatatatatatataaaacttaaatcaaaatacaaaacaaatcgtagccaaaccagattacaagtggtttttatttatcttcagtttcaattaactatattaaaaagcaaacccaagtaaaatcatgaatcgacttgccgactcctaccaactaggttcaagagattataacatttgtgaggtttatggtgaacagtggtgaccatgatatgatggtgcctttccttgcaactcaagcctggataagatctctcaattattccatcactgatgattggaagccttggatgataaacgatcaaattgctgggtatatatatgtttttctgtttctcttgttcattcattttctagtcgtatcacacacttatcaaactcacataaaaatcattcttgcctttgtttcttgacagatacacgagaagttattccaataagatgacatttgctactatcaaagcaagtcttcttgtgtcaacttaatatttgtattgtccttagactgcaataaaaaagactttgttttaattgttttgagtttgttttatttatttttttgttaaagggaagtggacacacagcagagtataaaccaaaagagacctctatcatgttcaaaagatggatcagtgcccagcctttgtaaaagaggatgatggtctttgcgtatgtagaataaaactatgtaacataaaaaatgtttgtatacaatataatcatctacttggtaattaagtactaccgctacacgtgattttttgttttgatgtagactactgaatcccttgcctgcttgaattcaaaattttaatttgtacgacggactgttcactcatacataccgatggtgattttaggggttggtattttcatattctgtttggttaatctggtttttgtaaaccaatgtaaatctcccagaccgatcttaccagtaacacccacaattctctcggacatgtgagatccaaccctatccgaccgtatatacgccatgttcagaaggttgtaaagacttgtttaccaattctataaattatcgtatgatatttttatatgttttcacacggttttgacaattattttttggaagatcacctattctgaaattgctgcagtccaaacacgtttaaatgtataatttgtttcaaaatagttgaccaaaaaataaatgtgatttggcgatataagtgacaaaatcaattcttttaaaacgggtaaatgtaattttggttttcttatcgttttattcaaacaaaattcattgtataactcgtgaaaaaggtatatgtaagtttatgttgtatgacgagaaaaatcacacgacgtcaatatgtgaatgcaagatctgcactttaaattttgttataagatctagggatatggtctagattctcatcgtatgagcctaatgattttaggattgaagtaatcgacgatttggatttgtattaacgaactgaaaaatgagagtacaaaagagatctctttagacatgacaaattttttttgttgagtatttttctgactaaacattacacccaaaaaacataagtattctttctggctgtaaccatacgtttttcttcatgtctccccttctccttttaaacgtactagttcgcagttcaaacaccacctcgatcttcgattacattttaattgagaaggacaaatattttattttattttttgggttttaaattttaaagataggactggctagatggttaaggttgtgacaaaattttcttaatgttgaggagaacattttcgttacaaattaagataatcagataaatatgtggtgatttgcaacttccgtaccttatcattattcatggtgttggtggactattcccgaagttttagcgacaaacgcaactcccgtaccttatcatcactaatataatatgattttgaatttatggataagtctagtgacatatatagtgcaaatggttgtctcaaataaagaagctgaaagaattgaaacaatattcaactagtcttttatcatttgagatgaaaaagttgaaaaacattattcaacttaaaaattgaaaaaatagcaagttataaagaaaagttgttcaacttgttcactacaatttgaatgatattgaatgatattcaatcctaaatgatttttattccattcaattttaggcaaccattcgtacccatacagaaagcaacatatatgatactgattgacaaaaccacttcgaaatggttgctccacacaaacaagaatatgagaagggcctacacaacgatattaattactgttaatttttgtttttgtctgcctgcatttagaatatggacaatatctcttcccggaatttgccatacaatcacaacaattaaagcagcgtaccataccatctaaataacagcattaatggctaccaatctcttattttttaggttagagtttagatctactttttaaaacctgattagcttgttccctctacaactataattaggggtggacgaaattttcgtcagggaaataaaaccaaattgaatcaaacagaaataaaacctatatacgttttaaaaattggtttaattatttgatcgcttgtctgtttgttctctgaagtttagtttatacaaccaacattgatatgtgtattttaagggatgatcattttcagttctgtttggttaatccggttttagtaaagctgttattaccaaactcttacaaaagtaattccgtttttttttttgttttttttttattctcggtttaaaattcgtgagcaagttatacataggttgatgacacaaaacatgatatggtgctgatggaactaaagtttccatgctagttagatcagcaaaacgcatcaaccataaactataaatggccaagattatgtcacaaacatccaggtacataattcagaataaactttttattacaaattttacgtcctaacaagtaacaagtaacagagagctcaaaaaaaaaatatgcatacagttatcgacatggctattttgtatcacttttaaggatttcacgtaaacaacgtccaggtacatgattcagaattctacactaccctttgtttgaggaagcgacacatgcttaatgcttttggccttttgccaagtgtatcaagaatggtataaactacaagttgacaatatattttaggcgaatgatttcaatggtggtagtactgggacgatacacttgtaacatttcaaacaatgcagtgacaacacaacagaacacaacacaacacaacatattttcctttgatcttgagaccatgcatcaattgcagctatcatcttttccacatactcagatctagacaaccaagataagtaatctctatttaaataaacaagcataatgtagaaaaagttatccagaaacaacaactctagtcacatataaaatttggcatggcctctgtagaagatagcaagaatgcttcatttcactattgcatcaaggacacaaaagttagtttaaaaaaaaaaaaggagaagataatgtcaaacatatacgtgtgcagatagacaccatgcttcatgtcattattgcatttttcttccctcacagcccatcaccaaagaccaagaacacacacaaaaaacttgttttaatgcgattttaatgtatttctctttacacaatcttactattttttttttatataaaacagaacaaattagtaagtttattatttgtgagggtgtttgattttaattacataccatattaataatttttgcttgggcctggaccacccaagtgtaaaggattatgaacaaaatcaagagcattaaaagcaacgtccctaccttatccgtgtttggtgatattatcaaatttttgcaaaagcaacgtacccatcttatcattattttataaagatcctatgtctatccgtaaatggactaatctttagacacacagagaatataatgagtttgaaaataaagtttctgcttctgcttgtcttgtatcatcatgttgattctgcctctatcgtcaagtttcttcctggttttgaaggccctcttcctttcgaacttgaaaccgggtttgtaattttttttttttttaaccaatgcatttatttgtgtatgtaaacaagcattcttcttaatgaaggtacattggtattggtgaggacgagaatgtgcaatttttctactatttcatcaaatctgaaaacaatccaaaagaagatcctcttcttatatggttaaatggaggacctggatgttcttgtcttggtggtattatttttgagaacggtaaatcttataataataaatttttaatatataatatatatatatctatatatgtatttatttatttattttttcttctttcgctaagcactactttcaccgagttatttaaattggtaaaaaaacaaaaatttaggaccggtgggtttgaagtttgaggtgttcaacggaagtgctccttctttgttctctactacatattcatggacaaaggtagccaatagtatgttcatctgtctatcacaaaccaaatgatacattcttcatccttgaaattttgtgtcaattaaaaaagcaaaaataagaaagaaaaaaaaaaacaaatttgtgtcaatttctcagatggcaaacattatattcttggatcagccagtaggatctggcttctcctactcaaaaactccaattgataaaactggtgacataagtgaagtaaagaggacccatgagtttcttcaaaaggtaataagagaaacttgaaaacgtgtcttaaaagcatttttctctatttgcattgaatttcttgtgaatgttggaattctcttggtgtaaagttatcatcttatttaatgtccaagtgttccaagcttaacacattctaattttttatttgaaccaagcggttgaggtgttttttaaaaattctgcgtatacgattgtctcattgattataacatccacatctcgactgcattttttttgttttttttttgtagtggctaagcaggcatccacaatatttctccaaccctttatatgtagttggagattcttattccggtatgattgtcccggccctcgttcaagaaatctcacaaggtatggttttatcatatcagtcaattaaagtccacttttcttcgaatatcatttaatccattttgttacttttaaacaatatcgacaacggtgcaggaaattatatatgttgcgaacctcctataaatctacaggtcattgatctttgatttacttcttgtatcatacataatttttcgaacaataaatattgatagtaaaatatattttcttaccaaaacaaaaacagggttatatgcttggaaaccctgtaacatatatggactttgaacaaaacttccgcattccatatgcttatggtatgggattaatctccgacgaaatctatgaggtatgaaataaggcatgcttatattgtcactagagagtttaaatatttgacgaatcgatatactacaagaaaaacattgatttcttatagccaaaaacgtcggaaaatggtaagaaacaggttatttctacaattttcctacgaaaaatattggtagtaaatgttccataggaaataaatattggtaggaatttggtaggaaatgtctcgagagtcttgctctgagttttacttatatggtagcaaatgtctcgcgagtcttgctctgagttttgcttatattgtatcctataataacatgattgaaacttgccatttcgaagcctcaaacgaaataatactgttcgaaactttcatcaaaaataataataataattttttttttttttttcaaagaataataataattgttcaaaactcttttgttgcagccaatgaagagaatctgcaacggaaattattacaatgtggatccatctaacacacaatgtttgaaacttactgaagaatatcataaggtacatcacactcagaaatttggtcgatacttttatttatttattgttcttttatatatcattactaattccgatttttgtttatccacagtgcactgccaaaataaatatccatcacatattaacaccagattgcgatgtaaccaatgtaacatctcctgattgttatgtaagtaatatctctttcctccaaaaataattttttgacagattttgaaaacctatttatgtaaagtacctcagctgcaaccatctatttagttataaaaactaagaacgtactaaaaatggatgaaatcaaatgtaaaactatgtgtggatatattttgacatttcaaagaaacatatttacaaggttgcttttgcagtattatccatatcatctcattgaatgttgggctaacgacgagagcgttcgcgaagctcttcatattgaaaaggtatatgccaagtttaaatttaagattattgatcaaggaagtttctaaatttaaattaaggacgatctatgattacagggtagtaaaggaaaatgggcgcgatgtaatcggactattccatacaatcacgacattgtaagcagcataccatatcacatgaataacagcatcagtggataccgatctcttatttacaggtttgatttaaaattacttatcaattttaactcaaatcagctcttaggttagagttaaacctgaatcttatttttaagagctggttttatacaactacaagtaggattgggcaaaattttataagctgatagatcgaaagtttagtaaagtttaatatttaaaatttccttgttcaaaaaagcacatacaaggaacaaatataatagtactacataaatatcaaatttattcaaactattatatatttatatataattatttttcaaacgacaaccgaaaacaagagaattttttcaaactgaaccaaacccgaatggaactacaaatggtttttttttttttttggatatagtttctgtaaaaacataaaacctaatggatcataccgaaaccaaaattgtaatctgaggttttatacaacttgtctgatttatggtgaacagtggtgatcacgacatcgcggtcccttttcttgcaactcaagcctggataagatctctcaattactcccccattcataactggaggccatggatgataaacaatcaaatcgctgggtaatatatatctatttttcctgttttatatatgtctctcttgtttattcatatttgtagtcatatcacaaacttatgaactcacgtaaaaatcattttttttttacagatacacgagagcttattccaataagatgacatttgctactatcaaagcaagtgttattatttcagtttaaacatttttttgtgtcactacattacaatgaaagtgtgtttattaatttttttttttttactgtttggattatagggaggtggacacacggcagagtatagaccaaacgagacctttatcatgttccaaaggtggatcagtggccaacccctgtaacaaaaggcttatgaccttcacctataattatctaccaactaatatccacgttaagcgcagttgtttgtgttgaaatgtttttgttgtttgctttgttgcattcttttgtgctttatgttacaattttatgtgttttatgtactacagttcattattgtgcgttgtgcaattccttttacatttaactagggactaacccgggctagccccggtatatttcctaactatacgtgcaagaaaatgatgttctatttaacatttcagtttaacttatatggtacaagtaattgtttaattttatctatccaaatatttttcattgtaaatttttttttcaatacatctttttaattattaatgtgtatagtattttctcaattatacttctctcgtaatttgttttacgatgttaattgaacatcgttctataataacgaatttgccacactttttttggtattgacaaaatttcctcaaatagcttggtattgacatttgccccacatcttttataatttacgaatatgccccacgtcttttcatattaacgattttgctacatatctgttggtcttaacgattttgccccacatttattggtattaatgaatttccctcacagcttttggtatttgcaaatttgttcccatcttttcgtatttgcaaatatgtcccacacttttcgaatttacaaagttacccaacatctgctggtattttgcaaatgctttcgtcatttccagttatcgaattaggctattgatgttgattcattctatctgaaattgagtttaaaatattcttctttttcacctaaattaaaaaaaaaaaaaaaaaaaaacttatagcaggttgaacctagagatttgatgttatgaaaccaccaattcttaaattaaatatagagatctttttccatagttgaacttgccctaccaaaaaagaggaagaagattttgaattgtttatcctttatagaatcaatgtttgaactcgaaaaaattgaatgatatgtcaagttcttgtctgacattaactacaacactctcattgtgttg

SEQ ID NO: 269 - DNA, 94038 bp, Arabidopsis thaliana
gaattctcactgatgatggtatagcaattgaaggtcctgtgtttagagagaagaaccaagaagagatgcttgaactcattcccaagattcaggtaacttttcaagatttagatattttttgctttcttgataagtctttaaaccataacttttttttttcttgacaggtcatggctcgttcttccccaatggacaagcatacactggtgaagcagttgaggactacttttgatgaagttgttgctgtgactggcgacgggacaaacgatgcaccagcgctccacgaggctgacataggattagcaatgggcattgccgggactgaagtgagtatcatatatccaaataagtctaatgttattatgcaaacgactcaaacatttttttaaactcttttaggtagcgaaagagattgcggatgtcatcattctcgacgataacttcagcacaatcgtcaccgtagcgaaatggggacgttctgtttacattaacattcagaaatttgtgcagtttcaactaacagtcaatgttgttgcccttattgttaacttctcttcagcttgcttgactggtaagttaaagaaattagctgattctgtttttattcaaattttcatttttttacaattatattgtcttcgtttctatctttacttttgtttctaaattaattcacaggaagtgctcctctaactgctgttcaactgctttgggttaacatgatcatggacacacttggagctcttgctctagctacagaacctccgaacaacgagctgatgaaacgtatgcctgttggaagaagagggaatttcattaccaatgcgatgtggagaaacatcttaggacaagctgtgtatcaatttattatcatatggattctacaggccaaagggaagtccatgtttggtcttgttggttctgactctactctcgtattgaacacacttatcttcaactgctttgtattctgccaggtaatttataacaatcataagttatactcaaaacacttaaaagtgttaacctacacttgtagattttatggtatgactaacttttgggtggtttgttcttaatgtttcaggttttcaatgaagtaagctcgcgggagatggaagagatcgatgttttcaaaggcatactcgacaactatgttttcgtggttgttattggtgcaacagttttctttcagatcataatcattgagttcttgggcacatttgcaagcaccacacctcttacaatagttcaatggttcttcagcattttcgttggcttcttgggtatgccgatcgctgctggcttgaagaaaatacccgtgtgatcgaagacacaatgctgataacaatctttctcttatataacagaagttcctattgacacattgcaaatttttcacaaagcttgcatttttgcaattttttcctttttgatattgttgactaagtttgagttaaataggctaaggagaattaatatactcatccatttttttttgtttctatgttcttgaaatgaatccatcttgtcaaaaaatcaaaaacaaaaacttggactagtacgagaattgcaaagatatatgattgaagtgatcattaaagaacatagaagaaagtggaccatactgtatttataatcctaagagtgatcatgtggcttttcttgggggagccttaattgtgatccactatcaaaaagattccattcgaattctgtggatcttagttgtggttgaaacataattctgaaaatgactagagttatgaacaagccccttttaaaatacaaggcaaaaaagttagcgactttcatacaaatcagatacttcccatcacaaatcatcaacgaaaaatccaagaaaacagttaactctcaaagaatatcctgattaatttatttaaataaaattataatagaaatgagtaaaactactgtttaaatttatattattaattaattataatacaaaagcaacatgacatatattaaataaaaaaatgcaatgaccgaccaaaaaatacaatgacataaaaatacatacttagtaccaacattgaaaatgcaaaatcaagatttgacaatactacgaaattgtagaagtgtagataaaattagatgtgtagtgattccagttcccaaattctttgatatttttgttaattccaaatttctttaatattgatgtaccaaaatagtaagtgattccaacttcttcaatattgctgcaaggctgcatgcaccgaaatagtaagtgattccaaatttgtttccaaaatagttattgtcaaaaccaaccccgtgtaaggtttggaggtacacacaaaaaatctactcgacgtggagcgaccagtgatcattgaatcaaaaatgcaacctacccactattgttttggtaactaactatattagatcatttttaccataaaatggatttcgaaattaacagagaaaatgagaactttttcacccaagttgctgcttcttcttttacttgttttaagacatcatgctgaatctggctctatcgtcaagtttcttcccggttttgaaggccctcttcctttcgaacttgaaaccgggtttgtataattttctctttttttccttatcaatccaaatatgtgttttagttcgtcgggtaatcataatggagtgaagagagatatttgaagaattgtgtattgttctcataataatgaaggttatgcacttatgcttatgatacatatattcttatagcagaaatatttcttagagttatacaaaaatttcttaatatattcacacaatatttatgataccttttgacatcttctataaatcatttttctgaataaaggtacatcggtattggtgaagaagaaggatattgaatttgagaaaaggaattgatcatggacacacttgtattctgcatgtgatagttttaatcaatatacctttagggattctgaatatcaaactaataaatcatgaaaagaatatcatttcgtttatgttaaaggggttctgaaaagaataccattttagatatttttcaaaactccttaaaagcttacttatgcaccacggcttatgcagggctaccacagtacactagctaaatattgggccaatgacgagagggtacgtgaagctcttcaaataagaaaggtatatgacattaattttgtcgagggaaataaataatgtcaatatcatttaaagatcaatgacacatcatcattagagagcatatgaaaagttaatatatgttcaaccattacttgcatattaaatcagttaatatgaatttattgatataaaaagtcacaaaacaaaaacatataatattttttttgaatctaatccaaaaatatttaaaatgtaaaaaataataatacaagattttaatttattttacatcttcatttcttttctaaatgttttaattatcattcttgccatctcttttatacttcaatttatattaattagttagttacaatgtatatttattgtataggttcgaggaatttgaagtattttctattgtatatggtataagataccaaaggacacaagtctaatcgcatgtgctcttctcgtttggttaaaaatcgctgtgattgtttttttactaaaaatcaagctagatgtcatattaggaactatatgttaataacttcatattgcggccattgttacgtaggtgttggaaatagacatttttgttatacaatcactagacatttttcttcttcatcttttttttttttgacttacatgaatataacttataagttcttacttcataaattagggtcataagagtgagcagatgttgtttgatataactggatatcttctatatatgattacagggaagtataggaaaatggatacgatgtaattcgaatatacattacgatgacgacattattagcagcataccatatcatatgaataacagcatcaacggataccgatctcttatttacaggtttgattaaaattacattttaaagaatcgatctagttctctatacaaactatgcggtttttggtaaacagtggtgatcacgatatggaggtacctttccttgcaactgaagcttggataagatctcttaattatcctattattgatgattggaggccttggataataaacaatcagattgctgggtgaataatttttacaatttttttttttgcttctttattcattaactcagtcgaatcatgagctcattagtcattttgaaatccctcttacgattttcttggacagatacacgatgacctatgccaataagatgacatatgctactatcaaggcaagtttttttttttgttcttactcttaatgttttttattacacaaatcattttgtttctcagtaactgttttgaggggtttactatagggaggtggacacactgcagagtataaaccagcggagagctttatcatgttccaacgatggatcagtggccagcctctgtaataataagagatgatgatgccctatgccaatgaaaaagaaatatttgtagcatcaacttttatatatatatatatatatatatatatatatgtttacaatttaatctactacaatattgtaaaagaagatcatctttaagaaataaaaatatttttaaaatgggctctcaacaaaacaaaactgtgtaagtccaaacgtctcataaataattaatcataatattcatgtctccaatcaaataaacctgagggagatggaagagatcgatgtttccaaaggcatactcgacaactatgctttcgattttatcaaaaaaaaactatatttttgtggatgttataagttttctttcagatcataatcattgagttcttgggcacatttgcaagcaccacacctcttacaatagtccaatgtttcttgagcatatttggcttcttgggcatgccgatcgctgcgggctagaagaaaatacccgtgtgatcgaagacacaatgccgataacaaccttgctcttgtaggacataaattccttgacacatgcaaaagttttacaaagcttttgcctttttgtatatcccctttttattttacattgttgaccaaatttgagtcaaataggctaatgacaattaatctactcatcaattcttttttctttgttcttgaaatgaatccattttatcaagaatgaaaacaaaaatttgaactaaaccgagacttgccgaaaaacggttaagtcatcattaataaacaacgcaggaagtggatcatatttttttttttttaaatgtaaaatttattcatcaaaaaagatcatagttacaattagtctgttcatttcgtcgccgcgggtacctgcggccactaaacaaacagactatatatgcatctatgatcatcttaatgtctttgatgagtttggcttggtatttcggtaattcaccgtgtctccactggttttgttctcgtcagattgtgtagatagtggcttgaaaggcgtatcgcaaaatgaaacaatgggtgcgactaatactagaatctgagattgctttaaggatatcaccaaactggtacgtgtcagttgctgagatatcccatgagtgagcttgtaccaaatctgagacgtgacattacatgagaagaagaggtgatcacgataagaaagtggatcgtattgtatttttttattccatcctctaaaaaagggtcaaatgatcattaaagaacaccgaaaaaaatggatcatattgtattttatataccaacctcttgatattttaatcgtttgactctttttttttttttttttggcaaattgccatcatcgcctaagataaccagttttccaatttttaaaacaattattatactatctttccgtcgataagttgtagtttgtcagatattttgaattgcaaatcttgtttagttaacaaagtcataaactacttttctcaaaatcatctcttcattccttagatccattataaaagtagagcgtgtaacatgaagtagttgtgtgcgtgtaacacgaaacagctacgtaacacaagaagatgttgattataaactaatagtcttgggattataatcttttattaatttatcgatatactaattgttctaaaaaaataatttaggatcgaagaaatatataaatttattaaggtattaattcatccaatatgatttcaaagatcctcaatataacctactcctacatgtgactattcaacaaaacgtctggaaacctctattattgataatatatggtcctacatatgactattcaataaaacgccagcaagcctcaattattggtaattaattaactaattgaactctacatgtgataattatcttttttttttttttttggattaaagatataaagatccttgtatcctaagatgactcaatctttagaaactaagagagaatggaattaacactaaaattgctggttctgcttctgtttatcttaaatcatcatgttggttctggctctatcgtcaagtttcttcccggttttgaaggccctcttcctttcgaacttgaaaccgggtttgttagttctctcttttgcaacaatgtgttttgagtttggagtttgtaattagtcattcttttgactaaaggtacattggtattggtgaggaagaggaagtgcaattgttctattatttcatcaaatctgagagaaatccaaaagaagaccctcttcttctctggttaagtggaggacctggatgttcttctatcactggccttcttttccagaatggtaaatctctattttttgctcttgctttaaggattattttcaaaggattgcttaaagtgggttaaaaaaaaattaagaccttggtttcttgatttcttaggacctttggctttgaagtccgaggtttacaatggaagtgttccttctttggtctctactacatattcgtggactaaggtagaagaaagtatgttcatatgttaaattgttaatgacaaaacacaatgatctatcaaattttttgattatttattcagacggcgaacataatattcttggatcaacctgttggagctggcttctcctactcaagagctccacttattgatacacctactgacacaggagaagttaagaggattcatgagtttctccaaaaggtaaacacgtaacttaatttgtcatctcaaagcatttgtcattttgtctctttgcattaacgcgcttgtgtatgttgtaattcgtgaatacttaataatcccttcgttcggtacggtttaatatttttaacacaaattaataaaaaattaaattatttgttttactaccttttattaatatgttttacaaaaaaaatcattagttaacaaagatatatattttattataaatctatattgaaaatctaaaacgttactttttgtgaaacaaattttaagttagaaaaggacacttcagctaaaatgtatttgaactcactaaaacattttgtttcgtttagccttcaaatcttcccaaattattttaacaccaaccttaagaatttttttttgttcctttttagtggctaagcaagcatccacagttttcttccaaccatttttatgctggcggagattcttattccggtatgattgttccggccctcgttcaagaaatctcgaaaggtatcatcacatacttttatttgaatatcgtttaaccgtgctctttaaaataacacactatgatgcaggaaattatatatgttgcaaccctcctataaatctaaaggtaattgcaatttaaatgctctttgtaatttcgtaagtatattgatttttaaaaagtttcgatcaactaaaaatcactaggatatttttttgtacactagaaactgatagttatgtgtcgacaaaataaaagagattgataattgtgtatatatataatatgtttttgttaagttgataattaatattattcttaccaaaaacagggttatgtactcgggaacccgataacgcacgaagacgacccaaactatcgcattccattttctcatggaatggcactaatttcagatgaactatacgaggtatgaaatatgtggcatgcttaaattcgactagtcttgttatccttggcatttttcacaactctttttaatgttaaaaacattttcttattaaaaaaaagtcaattagggaagcctgcaaaggaaattatttcaatgtggatccacgaaacacaaaatgtttgaaacttgtcgaggaatttcataaggtacacattgcacactttgaaatttggtcgatgttcagtaatttatcagatagtgaacatctaactcagatttgtttttaataaacttacagtgtaccgacaaactaaatgaattccatatactatcaccagattgcgacacggcatctcctgattgctatgtaagtaatatgtcttttctccacctagtgactcttgtaaaagggttggaaaatgaattgatgaagaaacattttttctttttcaactacacattaagtaaaataccgctccatgattaagtcaacaaaaaaaattgcattttatataacttccaagaaacatacttttaaggttgcttttgcagttatatccattttatctcattagcttttgggccaatgacgagagcgtccgcgatgctcttcatgttaataaggtatatgccattaataatgtgtgatgataaaaaagaaaagaagccttaaaatctaaactatggccgattgatgattacagaggagtattggaaaatgggagcgatgtaactatctgagtaaaccatacaacaaagacatcaagagcagcgtaccataccatatgaataacagtgttagtggctaccgatctctcatctacaggtaagagttagatacctatatctaaattattaagaacctgatcaaaaatttcctaattagagactcaagcaaaaccaaattaaatcaaaccaaaatttgttattattttacttttaaacccgaaaaaaggaaacaaaaatgaatagacaagaatttattaaaaatatataggcatatccatattacgtagaaatttaatttacgtaaattattatgtatttatgttttgcaattattattattttatttttttgtgtaaacgcaattatttaacttaaaacaacctaaacaaaccgaattacatcatggtgaaacgaaacaaaccaaattacagatggattttattttgttttactttctcttaattcaatataaaaaatcgatacattaatccacagtgtccattcatacatacaaaatttaagagattccaatattttgcgcggttgatggtgaacagtggtgatcatgatttggtggttcctttccttgcaacacaagcctggataaaatctctaaattactctatcattgatgaatggagaccttggatgattagagatcaaatcactgggtatatatatttttttgtgtttttgggttttcttgttctttcattttctcatcgtatcacaagcttataaagctccggtaaaaatcattcatcctttttttttaattgacagatacacgagaacttattccaataagatgacatttgctactgtcaaagcaagtcttcttgtctcaatttaacatttctatttgtcgtttaattaaaaagtattttctaatttgttttaagcgttttgattgtagggaagtgggcacacagcggagaataaaccacaagagagttttatcatgtttcgaaggtggattaatggccaacctttgtaaaaattacaattatgaattatctactatgtgagctatttgttcctgaggaggtttagaactctaccactagttcgacatgctatagttaccaataaatgaggtcttatttgggtctagggagactacaggccaaagacttggaacttcttggtttattgttatatgttgttaggtaacatttttgtgttattcatagattttaccttttggtacttttatcttctcacagattatattgttctgtgttgtgctgttattttttacaattaaacttagatttttaataaattcttttttgtctcaaatttaataagttatatacctatctccattttactcaacaatattttttagatgaataaaatatttctgattgtgtttttttatctttgcgcgcatttagtactttttctgtattgaaatgtaaaattatattaacaaaaaaaactgactttgcatttagtatcacttttagaggattgaatttgatatccaaatcatatcaatatttaggtaaagatgtggcgaggataagaacaaaataataagagccataaaaccaacgcccctaccttatccattattcatgctgttggggattttgatcttatgtcaaaagtgtataatggtatacagtgagggagagcgacgcatgcaacattataaaatatctattttcataaccaacccgatatggctgctccacaaaagaaaccaggcctacgtaacgtggagctactttgtaattataaagatttattgtttcccataaactggttaaatgattttagaaactaaagtaaaatgagcttgacactagagtttctgcttcttctgattgtacttatcttgagtcaccatgctcattctggctctattgtcaaattccttcctggttttgaaggcccccttccttttgaactcgaaaccgggtttgtaatatctctcttctttttcagcaattcaattatgtgtttggtttcaatttactaatcagtaattttctcaatgaaggtacattggtattggtgaggaagaggaagtgcaattattctactatttcatcaaatctgagaagaatccagaagaagaccctcttcttctatggttaagtggaggacctggatgttcctctcttactggccttctttttgagaatggtatatctataatatttcgctaagcattactagaataacttgtttaaagccgggggaaataaataggaccggtggctttgaagttcgaggtttacaatggaagtgttccatctttggtctctactacatattcatggacaaaggtaaaagtatgttcaaatgtcgatcacaaacccaattatctattcttgatcttattaagaaggacctcctttttttaagatggcgaacataatattcttggatcagccagttggatctggcttctcctattcaagaactccacttgttgataaaattagtgacactggtgaagttaagaggatttatgagtttcttcaaaaggtaataacaaaacgtttattttcttgttgaagcataattctttttcttttgcattaagatcttgtgtatatgttgtaattctcttagtataaaccaattgattgctagtggattcggataccgatctcggcgagatacagaattaataacactgattaaccaaactcattagaaccctcccgttaatttcattacttgccaagatattcaagaatttttattcaaacaaggttttaaacgattgtagtgtttattggtatcctacgagcggttagctctttaatagaaagtctatcttttggtttgtgcagtggttaagcaaacatcaacaatttttttccaaccctttttacgttggtggagattcttattcaggtatgattgttccacccctagttcaagaaatcggaaaaggtatgttcgttaattcatatcaatcaatccccatacacttttcttggaatattgtttaattgtctgtctctcaataattaacaatatatacaatgatgcaggaaattatcaaataaatctacaggttgtagatatttatttgtttcttatattttgttatttaaaaaaatattgaagattaatagtaatatgttcttacgaaaatagggttatatcctcggaaacccgataacagatactgaatctgaacaaaactatcagattccatatgctcatggaatggcattaatctctgatgaactatacaaggtatgaaatagtaatcatgcttaaatttttttctttttttctttttgacaccagatagttttatatttgacgagtccagtcttgttttgattgagtttatagtcaaaagtgttggatgcataaatattggttttaattaaaatatattgttgtaccttttacatagaataagtaaaaatatgtctcatttgtttgttttcttttcttttataggactatacaagtgttcaaatttgattggatgaaatattgttttaaacttatgaaaaaatcaaagtctttaaagttcttaaaccaatcacccctaaccttagtgtttcttaagccttaaatgatagcaatgtttcaatacttcttcttacagtcaatggagagaatctgcaaaggaaattatgtgaaagtggattcacttaacacaaaatgctataaactaatcaaagattatcaaaaggtacacattacggaatgttgttgttattgatcagaactcaatttgataatgatcatcactaattcagatttcttgggttattttcagtgtattcataaactgaataagtatcatatattattacctgactgcgatataacatctcctgattgctttgtaagtaatacttttttcctccatctagtgacccatataaaaggattgggaaaaatatccagcttttatgatattcctaaaaatattaaagaggttgcttttgcagttatataggtatactctcataaccttttgggccaacaacaagagcgttcgcgaagctctgcaagtcaataaggtatatgccaattttagtttaagatcaaaagtgatctattattttataggagactatgtaaatgggttcgacgtgatctattatgttttgcaactttatatataagttgtaaaggtaaagccattccacagttaatacgaaataacatttggccaatggcctccaattctctaaaaatttgaaggagataataaattctttagtttcatgtagctcattctaaataacataattatagaaatttgagttacgggttgatctttgtggtatttagagtgagaaaacacaaggggttttacgataaaacatggacttccaataattgagtaatcaaattcataaaacaaaatatagaacaattgttcatttaaaaacatttagagtaaattttcttaagatacctatttgaagtgtaagagtttttttatataagaattgaagattgtcatccaaactcatggatcatatgtcattgacgattctagtttttgcatctacggatttttttttcaactttattgttgataaaaccttatattttttggagtatctgacaaaaaaaaatattgagtgatttggatatcttatccatcaaaagaaaataagttagaaacgttggttttgaaaactaaaattttgtgaaaaaaacaaaaatttgttttaagactatttttctttttttgctaaatgacgatgatgtttatttctttagatatttgtgtgttttatttctaaaacggctcagaatccatcagttatagtatctctatacataaattttaaaatcttaatgaagatctaaaattgcagggaagtataggaaaatgggtacaatgtaactataaaaatatttcctacaattacgatatcaagagcagcgtcgcataccatatgaagaatagtattgatggctaccgatctcttatctacaagtaagtgttaaatctaaatttttaagaacaggaagtgttctatatacaaccagaagtaggggtgtacaaatttttcaaaaccagagagatcagaattgaattgaactaaccagaatttgtttttaaaaaaagcaaaaaccgaaactgattgtagtgtgtataccaaactaaaacaaatgcaaccaaaatttattagacctatatataattgttttttcatatatacatagtaaatataaacatatgcatattacgtaaataatatatatatatatataaaacttaaatcaaaatacaaaacaaatcgtagccaaaccagattacaagtggtttttatttatcttcagtttcaattaactatattaaaaagcaaacccaagtaaaatcatgaatcgacttgccgactcctaccaactaggttcaagagattataacatttgtgaggtttatggtgaacagtggtgaccatgatatgatggtgcctttccttgcaactcaagcctggataagatctctcaattattccatcactgatgattggaagccttggatgataaacgatcaaattgctgggtatatatatgtttttctgtttctcttgttcattcattttctagtcgtatcacacacttatcaaactcacataaaaatcattcttgcctttgtttcttgacagatacacgagaagttattccaataagatgacatttgctactatcaaagcaagtcttcttgtgtcaacttaatatttgtattgtccttagactgcaataaaaaagactttgttttaattgttttgagtttgttttatttatttttttgttaaagggaagtggacacacagcagagtataaaccaaaagagacctctatcatgttcaaaagatggatcagtgcccagcctttgtaaaagaggatgatggtctttgcgtatgtagaataaaactatgtaacataaaaaatgtttgtatacaatataatcatctacttggtaattaagtactaccgctacacgtgattttttgttttgatgtagactactgaatcccttgcctgcttgaattcaaaattttaatttgtacgacggactgttcactcatacataccgatggtgattttaggggttggtattttcatattctgtttggttaatctggtttttgtaaaccaatgtaaatctcccagaccgatcttaccagtaacacccacaattctctcggacatgtgagatccaaccctatccgaccgtatatacgccatgttcagaaggttgtaaagacttgtttaccaattctataaattatcgtatgatatttttatatgttttcacacggttttgacaattattttttggaagatcacctattctgaaattgctgcagtccaaacacgtttaaatgtataatttgtttcaaaatagttgaccaaaaaataaatgtgatttggcgatataagtgacaaaatcaattcttttaaaacgggtaaatgtaattttggttttcttatcgttttattcaaacaaaattcattgtataactcgtgaaaaaggtatatgtaagtttatgttgtatgacgagaaaaatcacacgacgtcaatatgtgaatgcaagatctgcactttaaattttgttataagatctagggatatggtctagattctcatcgtatgagcctaatgattttaggattgaagtaatcgacgatttggatttgtattaacgaactgaaaaatgagagtacaaaagagatctctttagacatgacaaattttttttgttgagtatttttctgactaaacattacacccaaaaaacataagtattctttctggctgtaaccatacgtttttcttcatgtctccccttctccttttaaacgtactagttcgcagttcaaacaccacctcgatcttcgattacattttaattgagaaggacaaatattttattttattttttgggttttaaattttaaagataggactggctagatggttaaggttgtgacaaaattttcttaatgttgaggagaacattttcgttacaaattaagataatcagataaatatgtggtgatttgcaacttccgtaccttatcattattcatggtgttggtggactattcccgaagttttagcgacaaacgcaactcccgtaccttatcatcactaatataatatgattttgaatttatggataagtctagtgacatatatagtgcaaatggttgtctcaaataaagaagctgaaagaattgaaacaatattcaactagtcttttatcatttgagatgaaaaagttgaaaaacattattcaacttaaaaattgaaaaaatagcaagttataaagaaaagttgttcaacttgttcactacaatttgaatgatattgaatgatattcaatcctaaatgatttttattccattcaattttaggcaaccattcgtacccatacagaaagcaacatatatgatactgattgacaaaaccacttcgaaatggttgctccacacaaacaagaatatgagaagggcctacacaacgatattaattactgttaatttttgtttttgtctgcctgcatttagaatatggacaatatctcttcccggaatttgccatacaatcacaacaattaaagcagcgtaccataccatctaaataacagcattaatggctaccaatctcttattttttaggttagagtttagatctactttttaaaacctgattagcttgttccctctacaactataattaggggtggacgaaattttcgtcagggaaataaaaccaaattgaatcaaacagaaataaaacctatatacgttttaaaaattggtttaattatttgatcgcttgtctgtttgttctctgaagtttagtttatacaaccaacattgatatgtgtattttaagggatgatcattttcagttctgtttggttaatccggttttagtaaagctgttattaccaaactcttacaaaagtaattccgtttttttttttgttttttttttattctcggtttaaaattcgtgagcaagttatacataggttgatgacacaaaacatgatatggtgctgatggaactaaagtttccatgctagttagatcagcaaaacgcatcaaccataaactataaatggccaagattatgtcacaaacatccaggtacataattcagaataaactttttattacaaattttacgtcctaacaagtaacaagtaacagagagctcaaaaaaaaaatatgcatacagttatcgacatggctattttgtatcacttttaaggatttcacgtaaacaacgtccaggtacatgattcagaattctacactaccctttgtttgaggaagcgacacatgcttaatgcttttggccttttgccaagtgtatcaagaatggtataaactacaagttgacaatatattttaggcgaatgatttcaatggtggtagtactgggacgatacacttgtaacatttcaaacaatgcagtgacaacacaacagaacacaacacaacacaacatattttcctttgatcttgagaccatgcatcaattgcagctatcatcttttccacatactcagatctagacaaccaagataagtaatctctatttaaataaacaagcataatgtagaaaaagttatccagaaacaacaactctagtcacatataaaatttggcatggcctctgtagaagatagcaagaatgcttcatttcactattgcatcaaggacacaaaagttagtttaaaaaaaaaaaaggagaagataatgtcaaacatatacgtgtgcagatagacaccatgcttcatgtcattattgcatttttcttccctcacagcccatcaccaaagaccaagaacacacacaaaaaacttgttttaatgcgattttaatgtatttctctttacacaatcttactattttttttttatataaaacagaacaaattagtaagtttattatttgtgagggtgtttgattttaattacataccatattaataatttttgcttgggcctggaccacccaagtgtaaaggattatgaacaaaatcaagagcattaaaagcaacgtccctaccttatccgtgtttggtgatattatcaaatttttgcaaaagcaacgtacccatcttatcattattttataaagatcctatgtctatccgtaaatggactaatctttagacacacagagaatataatgagtttgaaaataaagtttctgcttctgcttgtcttgtatcatcatgttgattctgcctctatcgtcaagtttcttcctggttttgaaggccctcttcctttcgaacttgaaaccgggtttgtaattttttttttttttaaccaatgcatttatttgtgtatgtaaacaagcattcttcttaatgaaggtacattggtattggtgaggacgagaatgtgcaatttttctactatttcatcaaatctgaaaacaatccaaaagaagatcctcttcttatatggttaaatggaggacctggatgttcttgtcttggtggtattatttttgagaacggtaaatcttataataataaatttttaatatataatatatatatatctatatatgtatttatttatttattttttcttctttcgctaagcactactttcaccgagttatttaaattggtaaaaaaacaaaaatttaggaccggtgggtttgaagtttgaggtgttcaacggaagtgctccttctttgttctctactacatattcatggacaaaggtagccaatagtatgttcatctgtctatcacaaaccaaatgatacattcttcatccttgaaattttgtgtcaattaaaaaagcaaaaataagaaagaaaaaaaaaaacaaatttgtgtcaatttctcagatggcaaacattatattcttggatcagccagtaggatctggcttctcctactcaaaaactccaattgataaaactggtgacataagtgaagtaaagaggacccatgagtttcttcaaaaggtaataagagaaacttgaaaacgtgtcttaaaagcatttttctctatttgcattgaatttcttgtgaatgttggaattctcttggtgtaaagttatcatcttatttaatgtccaagtgttccaagcttaacacattctaattttttatttgaaccaagcggttgaggtgttttttaaaaattctgcgtatacgattgtctcattgattataacatccacatctcgactgcattttttttgttttttttttgtagtggctaagcaggcatccacaatatttctccaaccctttatatgtagttggagattcttattccggtatgattgtcccggccctcgttcaagaaatctcacaaggtatggttttatcatatcagtcaattaaagtccacttttcttcgaatatcatttaatccattttgttacttttaaacaatatcgacaacggtgcaggaaattatatatgttgcgaacctcctataaatctacaggtcattgatctttgatttacttcttgtatcatacataatttttcgaacaataaatattgatagtaaaatatattttcttaccaaaacaaaaacagggttatatgcttggaaaccctgtaacatatatggactttgaacaaaacttccgcattccatatgcttatggtatgggattaatctccgacgaaatctatgaggtatgaaataaggcatgcttatattgtcactagagagtttaaatatttgacgaatcgatatactacaagaaaaacattgatttcttatagccaaaaacgtcggaaaatggtaagaaacaggttatttctacaattttcctacgaaaaatattggtagtaaatgttccataggaaataaatattggtaggaatttggtaggaaatgtctcgagagtcttgctctgagttttacttatatggtagcaaatgtctcgcgagtcttgctctgagttttgcttatattgtatcctataataacatgattgaaacttgccatttcgaagcctcaaacgaaataatactgttcgaaactttcatcaaaaataataataataattttttttttttttttcaaagaataataataattgttcaaaactcttttgttgcagccaatgaagagaatctgcaacggaaattattacaatgtggatccatctaacacacaatgtttgaaacttactgaagaatatcataaggtacatcacactcagaaatttggtcgatacttttatttatttattgttcttttatatatcattactaattccgatttttgtttatccacagtgcactgccaaaataaatatccatcacatattaacaccagattgcgatgtaaccaatgtaacatctcctgattgttatgtaagtaatatctctttcctccaaaaataattttttgacagattttgaaaacctatttatgtaaagtacctcagctgcaaccatctatttagttataaaaactaagaacgtactaaaaatggatgaaatcaaatgtaaaactatgtgtggatatattttgacatttcaaagaaacatatttacaaggttgcttttgcagtattatccatatcatctcattgaatgttgggctaacgacgagagcgttcgcgaagctcttcatattgaaaaggtatatgccaagtttaaatttaagattattgatcaaggaagtttctaaatttaaattaaggacgatctatgattacagggtagtaaaggaaaatgggcgcgatgtaatcggactattccatacaatcacgacattgtaagcagcataccatatcacatgaataacagcatcagtggataccgatctcttatttacaggtttgatttaaaattacttatcaattttaactcaaatcagctcttaggttagagttaaacctgaatcttatttttaagagctggttttatacaactacaagtaggattgggcaaaattttataagctgatagatcgaaagtttagtaaagtttaatatttaaaatttccttgttcaaaaaagcacatacaaggaacaaatataatagtactacataaatatcaaatttattcaaactattatatatttatatataattatttttcaaacgacaaccgaaaacaagagaattttttcaaactgaaccaaacccgaatggaactacaaatggtttttttttttttttggatatagtttctgtaaaaacataaaacctaatggatcataccgaaaccaaaattgtaatctgaggttttatacaacttgtctgatttatggtgaacagtggtgatcacgacatcgcggtcccttttcttgcaactcaagcctggataagatctctcaattactcccccattcataactggaggccatggatgataaacaatcaaatcgctgggtaatatatatctatttttcctgttttatatatgtctctcttgtttattcatatttgtagtcatatcacaaacttatgaactcacgtaaaaatcattttttttttacagatacacgagagcttattccaataagatgacatttgctactatcaaagcaagtgttattatttcagtttaaacatttttttgtgtcactacattacaatgaaagtgtgtttattaatttttttttttttactgtttggattatagggaggtggacacacggcagagtatagaccaaacgagacctttatcatgttccaaaggtggatcagtggccaacccctgtaacaaaaggcttatgaccttcacctataattatctaccaactaatatccacgttaagcgcagttgtttgtgttgaaatgtttttgttgtttgctttgttgcattcttttgtgctttatgttacaattttatgtgttttatgtactacagttcattattgtgcgttgtgcaattccttttacatttaactagggactaacccgggctagccccggtatatttcctaactatacgtgcaagaaaatgatgttctatttaacatttcagtttaacttatatggtacaagtaattgtttaattttatctatccaaatatttttcattgtaaatttttttttcaatacatctttttaattattaatgtgtatagtattttctcaattatacttctctcgtaatttgttttacgatgttaattgaacatcgttctataataacgaatttgccacactttttttggtattgacaaaatttcctcaaatagcttggtattgacatttgccccacatcttttataatttacgaatatgccccacgtcttttcatattaacgattttgctacatatctgttggtcttaacgattttgccccacatttattggtattaatgaatttccctcacagcttttggtatttgcaaatttgttcccatcttttcgtatttgcaaatatgtcccacacttttcgaatttacaaagttacccaacatctgctggtattttgcaaatgctttcgtcatttccagttatcgaattaggctattgatgttgattcattctatctgaaattgagtttaaaatattcttctttttcacctaaattaaaaaaaaaaaaaaaaaaaaacttatagcaggttgaacctagagatttgatgttatgaaaccaccaattcttaaattaaatatagagatctttttccatagttgaacttgccctaccaaaaaagaggaagaagattttgaattgtttatcctttatagaatcaatgtttgaactcgaaaaaattgaatgatatgtcaagttcttgtctgacattaactacaacactctcattgtgttgactaaagcttgaagatagcttgagtaacaagctaaaggatttgtatttaggaagtttgcctaaatgcttttatgtgtattttcctaataggtttaggaagttttcttgttattctcttatataaggagataccaatgtgtggtataacttatgagtttgagaaagagagattgagaactttagggggtgttatgggtttattgatttgtaaggaattggaaatccaaacaaaaatcatttgttattcaatgattgattttaaaattcgaattaaaatcatgtgttattgattcgatgatttataaatactagttaaaatcctttgttattcgtttagtcatttgtttttggatttgagaatacaaattatgttttaaatagaattaaatggatttgaaagagaaaaatagaaggattcaaatccatgggtaaacacatgttatttcaaaatccatatatcttgatttcataattaatagagattatcaaattctatatagatttacaaatcaataaaccaataacacccttagttttcagttattttttaaagctagtaataaagagagttattctttgttaatcttgtgttcttaatcttagcttagtcaatacattgcacctccattgttaatggtcttaagaaataatgaagccactttatttaactaaattaaaatgaccagttatataactgattgtttcgttaatttaatttcgacgcaaattcagatgcatttttttatggagtagatgaatttcaaagatttattatgggagcaaaaatctaggtttaaagtggaagtatataaaccactttgaacgttttaatcatattttccttttttacaacctcaacaaatcgtcttgtcaaaagaatgcagaataaattagttttttttttttttgtttgggcagcggaaaactttggaccgaatgagggttaacaacaaaagaaaaacgagagcgttagcttgtccatgattgatcaatggtgttggtgattcgctctaattttagccacaaaagcaatgtccctacattactaaatttgtggcaagtgtaatgatagatatatcatataaaattataaaccaatgtaaaaacaaacgattaaatacttgatgtgatggttgctgcaccaaccacgtgactccccgaaatggttgttccacacaagcaaatttgaagagagcctactcaacgttaagcgacttgtaaaaataacaaaagggcagtctaactttccttttctaatgattataaatatcctttttccgtaaaaagaaattaaaagaaaatgggttcgacactaaagcatctgcttttgcttctacttgttttgattcgtcatgttgattctgctgctatagtcaagtctcttcctggtttagaaggccgtcttcctttcgaactcgaaaccgggtttgtaaaatgtctcgtcctttttaccaatgaaactatgtgttgtgaggtccgagtttagtgataagccattcttatgaatgaaggtacattggtattggagaggaagaggacatacaattgttctactatttcatcaaatctgagaacaatccaaaagaagaccctcttcttctatggttagatggaggacctggatgttcttctctcggtggccttctttttgagaacggtaaatctcgaatatttgttctttagctaagcattattgtcaataagttgtgttaaatgaggcaaataaatatttaggaccggtggctttgaagtctgcggtttacaatggaagtaatccttctttgttctccactacatattcatggacaaaggtagcattaagtatatatgttcatattggatcacaaaccccaataatctattcttaatcattttaaacttggatctttttcttagatggcaaacataatatacttggatcagccagttggatctggtttctcttactcaagaactccaattggaaaatctagtgacacaagtgaagttaagaggatccatgagtttcttcaaaaggtaataagacaaaactaggtgtctctttaaagcacctgcatttgtgccttgaagctcttgtgtatgtagatggtagtagttctcttggtatataattatcgattaatattgggccgaactaagctaaaagcttcgcttgtcttcttttagggtccaaccgaccagtatatattcatatgaaaagatatatagatgttacttgatattctacctgcaattagctcaattaaaacacaatcatccaaagcatgtatattttcttttgtgcagtggctaagcaagcatccacagtttttctccaaccctttttacgtcaccggagattcttactctggtatgattgttccggccctcgttcaagaaatctctaaaggtatgtttttttttatgatcaattgatcccccaaacatttttcttttaatatcctttcccaatttaacaatataaacattatggtgcaggaaattatatatgttgcaaacatcttataaatctacaggtcattgatatttagttacttctgatatttggtatatttttccaaatttccaaaactaaatattcttagttttatctttttttaaacaaaagcagggttacgtgctcggaaacccgataacatatgctgaacatgagaaaaactatcgtattccattttctcatggaatgtcattaatctctgatgaactctatgaggtaagaaatttatgcaacacttaattcgttatcttttcactaaagagttttctatttgacgagtagaatatggccctgatttttaccttcagattatatattaatatcctttacaatccggatctaagcttgacatttcttgaagcctcaaatgatataacaatgatcaaaaaaattgcagtcactgaagagaaactgcaaaggaaattatgaaaatgtggatccacgtaacacaaaatgtgtgagacttgttgaagaataccataaggtacacactgatttggtccatgtttttttttccccttggtaataaatatcatcactaattcagatttttgttttgttttgtttatggacagtgcactgacaaaataaatacgcaacatatattaataccagattgcgataaaaaaggacatggaataacatctcctgattgctatgtaagttttatatatttcctccatctactgatttttatttgtttctacatttgttcatctttaaatagagacaaatttacgcaacatgtccaatatgtacaaatggaaaaataatggaccgatagatatagttcacacattaaaaattgtcatttttatgatacttcaaagaacatttatacaaggttgcttttgcagtattatctgtattttcttattgaatgttgggccaacaacgagagagttcgtgaagctcttcatgttactaaggtatagactaagttgaattaagatcttttaactaaatatttcagatcattgacgaaatgtgatgatatgaagaagtttttcaaaatctaaattattgactacttataagtacaggggactaaaggacaatggcagcgatgtaattggactattccatacgataacaacatcataagcagcgtaccatatcatatggataacagcatcaatggatatcgatctcttatttacaggtttgagttaacattacctttcaagaaacattacttattcaagaatttaacccaaaaaaaacaaattacttttcaaaaacttatcttctaccctatacaagtaggagtgggccaaattctaataacagagagaaaaggtaaacagattttagtgtaatcgaactatattgaaccaaataaaccaaaaattattaaaagtttgtttacatacaggttaaatataaatatatatatatatatttaaatagacacacacataatacttatattatatttattaaatcattttatgtttatattgttaattctaaccaaatgtctgtaaagattctcaaacaaagcctaaaggttgccagtttgagtgtcacttgggaatgaaccatataaaatgtcttggtccctcgtttagaaggatgtacgggcctatgcccaaaatctcttagtaatttaaaaaaatatatatatatatatatatcataaattctacttttctaactacaactaaactaaatcaaatttgaatcaaacaaaccaaacaccatatattattttatccggtttaagtttctataaaatcgaagatttatatatcaaaccggtaacaaaaccgtaaactagtttggctacaagattcaagagattaaaaaatttgtatggtttatggtgaacagtggtgatcatgacatcacaatgcctttccaagcaactcaagcctggataaaatctctaaattactccatcgttgatgactggaggccttggatgataaacgatcaaatcgctgggtatagatattctttcttgttttaggtttctcttgttcattcattttcttatcaaaactcatgtaaaaatcatttttgcctttttgtcttgacagatacacgagaacttattccaataagatgacatttgctactgtcaaagcaagtcttttaacttaacattttttctgtcattgcattacaaatttacaatgaaagtgtttattaaattctttttcctgtttggattatagggaggtggacacacggcagagtatctaccaaacgagagttccatcatgttccaaaggtggatcagtggccaacctttgtaatagaaggcctcttttagaggcttattgcctgtacgtattacatatattaatattcacgctacgcgcaattcttttgttttgagatgtttacagaaaataggataaaaagtttgtccttgacattttgccttcctcaggattactatttggtatcaaggaatcatttcaaactgatgttaataaccctgaaccaactattttactcataccctttttcaccagagatgtagccgatgtaaacctacttcactcgtaagatgttgatgagatctttaatggatctattcggtatatttctgttaacatcagccttgaaaccttagcaaaaacataactacgattccaccttctgactcgccttgagacatatgattacatgcctccaaccactaaagctatttttgttgctcattcgaatttcaccaaaactttaccacagcattgctgagcttcatcatgaacaaatcgtcttgtcaaaagaatcaacaacattgattttttgacaaattctgaaactttggtatttttggcattttttcctttgtttacaacttttttttgggcaaaaccttttttacaacttaaacaaatcttccttcttgtcaaaataaagacgaataaatcagttttttttttctggttttcatcacaaaaataaataaataaataaaaacaaaaaaacgagtgagttaagttgtccatgattgatgcatggtattggtgattcgctcagattttagccacaaaagcaatgtccctacattattcattatgtgtaagaaaaattgctaaaaatatcttttcaaaactatccttttttaattatgttctttgcttttgccattttcgtttataccttttttaatttttaatgatcattttacacatattttaaaaatattttaggttaacaaatgaaatattgatttttcccgcgaaaaatattccgaatataatttttccaccaaaacaaaatttccctccaaattgttttactgcaaatttttttttggcggagaatatatttacaaaggtttttaaaggatatacaaggatttaaaaacctttgtaattctttttaaaactcttctaaatctttttataactatttttaatggttaacaagagttttgaaatggttccaaaatatatacaaatttttaaaaatatttacaattttttttagatttaaaaatcatttaccatttttttaaatactttataagatttttaaaaagatttacaaaggtttttaaaatccttgtaaatcctttaaaaactcttgtaaatcattttaaaagtttttataaaggttttcaaagattttaaaagattttaaaatatttacaaatgtttaaagtatttacatgtgtattgaaagactttataccaaaaggttttaaaatgattgacaagttgtttttaacaacttttaaaatgctttaaaaactttaaaatgattttttaagagtttttgaacgacttacaaaggttcttaaacgatttacaaggatttttaaaggatttttaaatgcaaatttggcggggaataaaattttgcagaaaaattttttggcgggaaaaaagaaattttggcgccaaatgttattcacattctacttacatgttctgattagatgaagggtaatttggtaattttcttcaaaaaaatagctatttttaaaaatgaccaacagaaaattatattgttgcaaaagggtattagaaaaaaggtattttgtaaatctcctaatttataaaaagaaattcttacgaatgtccttcaaattttacctttattttatactatcgttctctgtaatatatttttatttatattattttaaaatttttaatgatcattttactcctatttataaatgtgttaggttaacaaaatgaaatattgatttttctaaccaaaaatattctaacgctaatttcaccccaaaaaaatcagaaatttcaaataataattttctccaaaaaactatttttggcgagaaatggatttacaaggatttttcaaggatttacaagagttttaaaggactttcaaacctttgtaattttttgttaaaattcggtaaaaactcttgtatatcatttaaaaattttttaatgctaaatattttttcgcgaaaaaattacagtttttaattttatatttttttttagataaaagataatttagtcattttggttatggaaagagatagttttaaaaatgaacaatgtaatagagtatttttgcaaaaaaaacattgatattttttattttacaaatccatcaattaaaatttaaaaatataacataactaaaaacaaaataaatgcttgggctccgaaaacttggaccagttactggataaatcaattaatcatttgggccccgaaactttggactagccaatcgttaaggatcgattttaagactttgtggaaagtgtaatgattatatgaatacaaacaatatactaacactgaattcttttagtcacgtggttgaaaagatgtttatttatattttgtattaatgttcgattttgacagaaaaaattgtcatttaatctaccaacttccaaaattgtaaactgttttatacatcagattcatatgtaccaaaacttaaacgttgatcagctgtttgaaacatgagaatacgttaagcagacaaaaaaatatactgttatttaggtataaacattcagatttgattcgaattatgttcgaatttatttggatacaaataattcagatacaagagtttttgcccgtagttctagcgagcctttatatatccaacgaaaaaagatttttaaaaaatgaggacaatgtaatagacaacgaaggattttaagaagaaaaaaaaacaatgtattaattgtacattaatattgtagatgctacgtgatggtgtggcacacaaaactatttaattttattttttttaatattgtcaaaaccaatatttattgatctgagagggcctactgaaggtggaaggtctacggaattagcaaaaacaatataaatatttgatacataaagatcccttttctttcgctgaaaggactcaaatctttagaaacgaaaagagaatgagtttgatactaaagtttatgcttcttattctacttgtctcgagtcatcatgttcgttctggctccatcgtcaagtttcttcctggttttaaaggccctcttcctttcgaacttgaaaccgggtttgtaatatgtctctttttttttaaccaaccaatgcaattatgtgttgtgagtttggagttagtaattagtcatttcttattaatgaaggtacattggtattggtgaggaagagaatgtacaatttttctactatttcatcaaatcagataagaacccacaagaagatcctcttattatatggttaaatggagggcctggatgttcttgtctcagtggtcttttctttgagaacggtaaacctataatatttcttcttcactacgtattattttcagtgacttgtttaaaacgaaaaaaaaaaaaaaaataggacctttggctttgaagaacaaggtttacaatggaagtgtcccttctttggtctctactacatattcatggacaaaggtagcataaagtacgttcataatggatcacaaacccaatgatttgttcttgatctttaaaagttttggatcatattctcagacagcaaacataatattcttggatcagcctgtgggatctggcttctcttactcaaaaactccaattgaaagaactagtgacacaagtgaagttaagaagatccatgagtttcttcaaaaggtaataaaacaaagttaagtatctttttgaagcatttgtttttgggcctctaagcatgtgtatttctcgtgtgtgaagttattgattgataatggatatcgggatatggatctcggccacatgtagacttaactacgccagttttcgtgacttgtgaaaaccaccccgtctcatttaaatttaacacattttgaattttatttaaattaaggataatataatttaggagtttattagtagttcccccaacaaaaaaaacaagaaaaaaaaagattagcttatcaattaaaatctagagctttttgtattgcagtggctaatcaagcatccacaatttttgtccaacccgttttacgttgttggagattcttattcgggcatgattgttcccgccctcgttcacgaaatctcaaaaggtacgatcttatatcatatcaaccaatacccttacgcttttctttatatttttccctcatgttttaacaacatagatactatgatgcagggaattatatatgttgcaaccctcctataaatcttcaggtcattgatattcacttgttatattatgtatatttttcgaatacttaaatttgtttttgccaaaacagggttatgtgcttggaaacccgataacacatattgaatttgaacaaaactttcgtattccatatgctcatggaatgtcgttaatctctgatgaactctacgaggtatgaaatcatctatgccatgcttaatttgcttctttttttttttaagaatcgacttatattttatccttcactaaccagatctaaccataccatttttcaaagcctcaaataatataaaaatgttcaaaactctgtttttcagtcattgaagagaatctgcaagggaaattatttcagtgtggatccaagtaacaaaaaatgtttgaagcttgttgaagaataccataaggtacacattaaaaatttgtcaatttttttttttttttgcttggtaattaatataatcactaattcagattttgtttttttatttatttacaagtgtactgacaacataaatagccatcatacattaatagcaaattgcgatgactcaaatacacaacacatatctcctgattgctatgtaagtaattcctttttcctatctgattacgctcctatttgcattaacttatagaaagcttacaaagataatcaaaatttaaaacaaacatccgtttaagatcgagtaacaaaaatgaagatgatgatatatgttgtgctgaagatagtaactaagtatatggatatcatttttataaattttcatgattgaagctactggtatataattaagaaaacaaatgagttgttataatcatctttaaaaaaaaaacggaggaaatatatgactatttttggaaaggattagagtgtttatatcatttttaaaatctagacatgcgcttgtttctacatttattagttgatagtaaaatatggaaaaattatagtatcatcctcttacagacaaatttaggcgactagtatgatgaatttttttgattaaattatcaaaatttgtaataactttatgctcaaagtcctaaggttacacaatctttttacttatgagttgacatacgtttatttcgatgatttcgattaacatacgtttatttcgattaatattttaccaaatttaaaattttattttatgatatttcaaagaaacatatttactaggttgcttttgcagtattatccatatcatctggttgaatgttgggccaacaacgagagtgttcgcgaagctcttcatgttgataaggtaaaagccaactttattttaagattgttgataaagcgtgaaactatatagaacatgtttatttaacaaaaaattaacaactacgtacgtacagagaacatttttaaaacctaaattatatattgttacaggggagtataggagaatggatacgagatcatcggggtattccatacaaaagcgacattagaagcagcataccttaccatatgaataacagcatcaatggctaccgatctcttatcttcaggttagaattaaatttacttttaaaagaactgatcgtatacccctatacaaactacgatatgggtgcacaaagaaacaattacaacaaaggaaaaaaaaagagaaaaaaatatattcataaccagagatatctgaccaagaatacaatgaaaccagtaaagttttacaaaactatcgttaaaaacataaaacaaagacggaaacagattttagtgtacttgagctaaactaaagcgaatgaaccaaattttatattacgtaaacataaatttacaaaaacctttatagatttgtaaactacgatcaaaccaagtccaaactgaaaaccaaacccaaagttatatgcgttgcatcaaaccgaactgaaaccaaatcaaagtataaatggtttttttttttttttggttttagttttgtatagaactaatttgtacggtttatggtgaacagtggtgatcatgacatcacaatgcctttccaagcaactcaagcctggataaaatctctaaattactccatcattgatgactggaggccttggatgataaaaggtcaaatcgctgggtaatatatttatatatacacactttttgttgtagatctctcttgttcgaacaaacctcgcaaactcacataagaatcattttcttgcagatacacgagaacttattccaataagatgacatttgctactgtcaaagcaagtcttaattgtttcagcttaacatttttattttcattgcatttccatttgaaaaattgtattataattttgttttgattacagggaggtggacacacggcagagtatctaccagaagagagttctatcatgttccaaaggtggataagtgggcagcctttgtaataaagactcgtgagttttagtcttttacgtatgaaaaataaaagtacttaccatgaaatgtttgtaatagatgctaatggcttttgtcagctttatgtcctttgtctccttgtcataactttctcgatttgtacgtgatactaaataagttggaatgagaagtttctgttaatgaatctcacttttgcgaatgatatactgtaccatacttgaatcattctatttgactttactcgatccttatatactagtaagtttcatgggtgtcatacaaaattcgttaaaattaatggattagtccatgtttcaagtgtaatagctagagccatacttcgatatattgtaacgttgtttccttcttcaactctgatttcgatacaagaaaactttaaacagatgtatcacttcttgtaatacttcacgtctgttacttgaacacgataaacagctgtatctcagcagtttctaatactcggttctaacaccaacatagtctacacaaactccagtcacaacttgatatacatgtacattagtaataaactaataatcgattaatttaagttaagctctattaaaaaaaggatctgtggaaagcaaacatttagtagtttgggctttctaatttcaatagacgaaaaaagagtaccgaaaagcaaaatggtaatttgggcatggtccggcccattttatacagacatgaaagtaaatagggaaaaaaaaaactcgattatcagagccaggtttcgatcctgggacctgtgggttatgggcccaccacgcttccgctgcgccactctgattttttgatagatgagtcattctttatatatataaaagagattgaaagataacatcaaaatatagaccaataaaattacagataaaatatattacaaaaaatccaaaagttcttggaaatagatagagaactatccataatcgcttaactttatttgttgttctaagaaaatatataaatgattcaaaaaaaaaaaaaaattaattcgttttctaaatccaatatatttaaacataactgaataaaagtgccataccgtaatacataccctttttaaaattgaaacatttaaactattttattttgtttttaaactaattataaaaacatttaccatatcatttaaactaatttggtgattatgaaaaagaaaaaccgaaattcatatagataattacaaatacgaacgtaccgttcatgttcgtaccgttcataatttgacaacatataatacatttttattgtctatgcgtaatcatcataccattcttcatcattagcatccaaatattcttcttcatcatcatcttttttatctgatccaagcgattcgaccgggcgagaaaggtttggaatggttcttgcctcaccaactatcttcataatctcctctactctttgaggagaaaaattaataagattaacattcctttggtaatagattgcttgtgctggctcctttaattctcttggcaaattctttaggaaccatgcatgactcttaatctctttaagcgtacttctctataatagttacaaaacaacaacagtttaagaagaataagttgattagcagataaacaataaggttaaaatatatctctatacttacatgtaacggattgtgcacaaaaaaaaaaaaaaaaaacttacatgtaacggattggcaacaaatatacgagatagtaactttctgcagtcttcggatatgtgaacatatcctggaatcttgtagtttacggccattattttctgcattttcaaacccaaaaatgacatatgagtgtgtgattatatacgaatcactttgtttatttgattatatataaaagacctgaacagtttttcggaaattgcgagggtctttagggtcttcgaatggataagctcctaccaacataacatagagggccactccacaagaccacacatcaactgactgtagaaagatatataaatcaaacaatctcaagttatattctaaatctgtaatcaataatcatcgtcatttttatagtttcttccgacaaggagtagaacatgtaaagttcgaattcaggttgttagatagtttttttgtatgaatttgggatttaaaaataggaatttcgattattatatttttacaaaattacgtttggtttattttgttatactttgttttcttggatttaatttttgtttgcgaataaacaaaacattattttaaccaaactaaatcttaaactttagatatatcattttctaactagaaagaaaccctgaccaacctttgataagatttctttttgaatataaatcatccctcccaaaagattaaaataggggaacaaaatttaacatctttcggaggatcgattttttgctattagactaccacacatttggtagtatgttttgcatttagctcccagattaattagcggtcgattcgaaacggacaagtgtcctcttaggaaagtgataaatataatttaaaaggtaaacaccacgaaattgtgcatgcatgttacttgcgaaaacaaatattaagttgactaatgaacattttgatgacgttggttatttgacagtggccatttaatttgaatagatattggataaagtcgatgtatatagtaattagtatagaagattagtaacaaatgtcatgtgagtggataagtgaggcaagcttttgtcgtttactactcttttccacgaattatggttttataactattgaaagtggaatgtccacctaaaaaactattgaaagtggaattatatgaatcacttgtaaatatcttcgttacggggtaaaataaacacaaatatcttatttactacgattaaataatggaaactagtgatgtatgtaataatttaaatacctttccgtcgtattccgatcgacaaaaaacttccggtgctatatatgccggagttcccaccgttgattttgggttggagtgcagaacagaagactgtatacaaaatttagaaattattatccattcagaaatttagattatgttacaaaaattagaagaaaaaaatggaatttactaaaagaacaaaaaaaaaacctttgagtagccaaaatcacaaatttttaaacgtggtgctgggcttccatcaagcaatgtgttttctaatttcagatctctatggcatatttgctgcaaaataatttgtttcattaataaaacacatcacacacacaactaattacatacaacttgagttgcatcaaaaaaaaaaaaaacgttaccaatgcatgtaagtaatggactccacaaatgagttgttgaaagaaatatcttgcctgcatgtagaaataataaattaattgaaataaatgaacttttaacgaataaaaaatgtggtgacgaaaattatcatttattgtccattaaaatgctgttgttctttttttgctaaaagtgaaatgcatgttaaagacaagaaaaaaagaatttcatttccaaacctcagcttcgctaaatcgacccacgctagatatccgctcgaacagttctcctccagctgcatactccattactattccaagatgtgtcggagttaaaacaacctaaatcatcaacacaccaagtttcaatatttttttattcgcatcaaaagtgtcaaatttggtgtagtttccgactactatggtttgaatattgaacatgtcgaaaaaaatcattggatcgaatagtcaaaaatggataaattttaggagataaattttttcaatatatgaactcagaaatttaagtaaaggagctaattaagatgctcatccttaataacttgcctctttaaaccgaacaatattcggatggttgagagctctatgattgattatttctcttgcaacgttctcatctatctgcatcaggcaaccagtttggtaacaacatgaaagttcttagtataagaggaaagaacaaacaaacaaaactaaaagaaaacagaaagaaaaaaaatggaccttgtagcctcgatcgatgaatttgacagccacaagctcgtttgtttgcttattacgcataagccgagccaatccgaaattaccaaatcctaaatccttcaccatctcatacttctccatagctaccacttttgtttttgttctcacttccctaaaatggtcctttattattttttttttctttttgatgaatcttctcgtccaaaatatctgtagagactagatatatatatatatatatatatatagagagagagagagagtagtgactaagaaggatgttgtttagtttgtctcttaataaaagttattaaatctctctcacacacacacaaaaaaaaaaaaaaagtgatttagtttacacgtagcaaacatgacgaatacttgaataaaaatgttgaaagagcttttcaggatacgaatggacatttctcgtatctaacaattctttcttaaccatttttacctctacaagtatcacttttactatttcttgtatgggtttaaagatactcaaactgttgaaatttacctctcaagcaagattaggtcattggattgtgggtttgagttttgaatatcctgcatacgcgtcaccgtttaggtgaacgttggaccaatatctgcttggagaaccccttacaaaggaggaaccgaagagacaagaagagcaagccattcatgtccctctaccaaatccattgtctaagaaatgagaagtatgagcctgtaaatgtgaacgatcaagatcttgtgagtgagattttaggagatgtcttggctggaatttagtctgtacaagagaaaatttaaacatgatctaatacaaagaaacccgaaccagatgatgcaataaaactttacgattgatttataaacctctttttgtgataactttatttcttatgcagataatatgagtctatacttacaaaatttataattaatcattcaacactgatgattttaagtctcagtaagaatttataatttttttgaaatttaacttgattttttttctatttcacagttttcatatggacaagcaattaaattacatcaaacatttaggggactattttttgcccttcaaatgctgtttcacttaaactaatgaaattttcattttaaagtcagtttctttcaaagtcaaaacttataaatgatagttatgaagtgaggaattgtcatcttgcggctcgacggttggtgtaaaaggcttctatctgcggcggaagttgacttggggtcactatatacttgcaaagagattagcggcggatccgatggatcctagatggctagtgaccccaacaataatgtacttgtgagagtttgtcttcgagtttcatgaataagaagagaaggcaagagaagactctcaaggaatcagaaggtttgattcaaagttagaaaacttcaggcccatacgcaagaagcccatctcgtacaagtcgttgaagaggaagcacgcctgcagcattgtttccttttaaaggtttgtgtcgttctgtcctttgtagaagtgttcgaacaaaacaggaaaaacaggggacaaagaatcaaagatgcagagagtagatgagatggaatggcgtgtttggttgaatgtagttaatgagttgtgtatgtacaagctccagtaagagccaactgtatataaggactgattctagtggattccgggacaacaagtttcccggcgtgagtagggtttcacactgagacctgaacacgtaaaaactctctcttgcactttactttctctgcaatttctctgtttctactctgcttcaagtctttctttctaagtttctttcacacgagtgtaatggagagaaagagaggggtttatggtgataaaggtcgctactttaacacccaaaatctccacagtacttttgtcactatctgaattaaacttggttcttataacatgctaaatttcacaggcttctgactacaaccaattgagtattactctaggtccctttacactgcgatgaaactcgagaagagatcgaaaactcaataacttactaagtaaatagcgtaaaatatacaaaacgactatcaaccattagtgtaagagagttttgggcttccataatctctccatagcatctttaaagtacgattacttcaatggatatattttgcttgtaatgttattaaattatcgtctcgcaggatcagataaaactcttatgaccccaagaacatcttacaaggttcatgactacatacccgtataaattttcatcactcaaaaaatacaacttattattgcacaccataaacaatgtgaaaactatatccatcacttaaacaagaaatggatatcttcattatgttggcttttgattctttttccttttccttacatatacgattaactctctggatgtactagaagtatcttccacttcaactatttctttaccatgtgacacattttgagtcttctccattttcttcaaaagaaccaacatcaatctcaatcaataccaacattatcatcttcaaaaaaaaaaaactatctttatacaaaccttcttatttaagcgctgtctagacattaactcatagaatttccgcatcatcatctcttcttccacctataaacacaaatgtatgtaagattgatttcttgctcatattattcatatcaaaagtacacaaagtttcatcaaacaaacctcaagtgtttggagttcttgagtcatcgttttacgagtttctaaaagcaattcagtttgcttctccaaatggctgttgatgtgctaacaacggtaaatcattatacgcaatgcacacacgaaaaataagcgtaaaactgaaaacaaagacgcactttaataaatcgtcggtatattcaggatccatgctccacaaattgatcaacttcaactttatactgatcttgtgctgatcacaagtggatcaaaatgtcatgagaatataatagataaaaattacgtacaaagcacagtttgattaagaaaaaggagagtcttttatcattgattcattcacacacatatcactagagaagatatgattctaataatctaaagggtatgatcacaaattcgaacagttaacagcaaaaacataattaaagaaccaaacaaaaaaaaaaaagcagatttagagaaagaatatcttagttagacaattcgtcgagcaactggtgtgcatagtctcgtgcctatcaaatttttcacaatgccacgatacttaaatcagaaacaatcaattacgtctaatatatagataaatcatcaaaaaggaagttcttttacgtaccctttcgtcaaatttaacgattcttataactttcaccaccataaacacttgacgattctcttcttctctctctcaatctcacccaaaatcaagtcctctcttctacaatggagttgactgggctaatgggccggtgtgactaggctaatgggccggtctattgtgacccaaagagaacaacaaagataaataaagtttcgatttttatgtttatcagctctatgtgcttctcattagatgagagactttcgctaatattttatgtgtttgttttgttttttgaatgcagaagtccataaactttatatactagcgtaagaatatcctaacttaacattctaataaacataacacttatataggttgaactacacttggtatttgatatttgtagttgtaattttcttttagggttctttgaaccactccacgattttgatccttgattaaattttaaagtatgttgaaaagtagaaaatatgtgtatcgagaaacgatctctgacttctctgatgttatgctttcactaaccatctttatagaaaacatacaaaaagatttgattcgttttgtcctttgaataaatgttaccaagaaattctgattaccgcaggaaagatgcaacttttggattcgggtttatattttaacataacaaatttacaacacaatgggcaaccaaaaagaggagttcatgtgccaagcacttagaaaaaaagaaaaaaaaaaaaaaaacaagcgtggtgtttgggttttcgagccttgagaggttggtgggtgtgttgttgtgaatctctaagttttctctgtaaattatatatttgtttacatgtatataaaacaatgtttctttttaaagtgacccttttaagctttcttgaaaacaagattgtgcatagatctcttctaagatccttagctttgttttctcttttgtgtctaaagatcttgaaagtcttgtgtgcaataacttattaaagagatagaaaaaaatgaagtttatgaaacttggaaccaaacctgattcatttctgtctaaaggagacaatgttaggtttgtagaaaacaaatatttacctctatgtatttctctgattatgcttaagcaatgttttttctaaaactgatattatttttattggctcttaggtatgtaacaaatgagttagaaacagagatcatcatcatcatcggcaatgtcaagttctatctgcataaggtatgaaacaaactctagcttttaaaacatcaaagaagaagcaaagtttttatgtttttgtgtgtttttcagttcccattgctgtcgaaaagcggattcttgcagaaacacatagcaacatcaaaaaatgaagaggagaagaagaaccaaattgatgagattgacatatcagagattcctggtggttctgttgcttttgagatttgtgtcaagttctgttacggcatcacggttactttaaacgcttacaatgtggttgcggttcgttgcgcggctgagttcttggagatgaatgaaacgtttgagaaaagcaatctcgtttacaagattgatgttttcttgaactcaaccatcttccgtagttggaaagattctatcattgttcttcagaccacaaaagatctcttgtctgatgactcagaggagctcgtgaagcgttgtctcggctctattgcttctactgcttcgatagacacctcgaaagtcaaatggtcttatacttacaacaggaagaagaagcttgagaaagtgagaaaaccagaagatggtgttccaaaagactggtgggtggaagatttatgcgagcttcacatcgatttgtataaacaagccatcaaagcaatcaagaaccgaggtaaagtcccgagtaacgttattggagaagcattacatgcttatgcaataagaagaatagctggttttagcaaagagtccatgcaactcattgatagatctttgattaatacaatcatagagcttctcccggatgagaaaggaaacatttcctctagcttcttgaccaagctacatcgagcatcgatctttcttggatgtgaagaaaccgtgaaagaaaagttaaagaaaagagtcagcgagcagcttgaagagacaacagtgaatgatatcttaatgtatgatttggatatggtgcagagcctagtgaaggagtttatgaaccgtgatccgaaaactcactcgaaagtatccgtggcaaagctcattgatggatacttagctgagaaatcaagagatcctaatctccctcttcagaacttcctctctctcgctgagacactctctagcttcccaagacactctcacgacgtgttatatcgcgcaattgacatgtttctaaaggtaaaacaagattcaaatcctctgtttttcataacgtttcttgatttgttaataatttggaaaattttcaggaacattcggggattagcaagagcgagaagaagagagtatgcgggctaatggattgtaggaaactatccgcggaagcgtgtgaacatgcggtacagaacgaacgtttgccaatgcgggtgattgtgcaagttctcttctttgaacagattagagccaatggttcatcaacaggatatagcactcctgagcttaccactactactctaaacactgaggatgatgaatgggaccatgagaaagagttttgattgaatctttcttattttgtttcttcaacaccatctttgagttttactggtagttttcattttcctaaattagaaaacatttggtgcttgacctttgtaattgggccaagttttaatgggctttgtgttcggcttgaagcctttctcatctcgaattttaaatgagaataaaaatcagagcaaattttgcattcatttgtctcgttgatgatggtaatttcactaatttgggaaataaaatcacaaacttgtagtcaaacaataatggaaaaatttggaaataagaaaaataaaaaaaatctgatagagaaagttgaataatattcctttccttaaatataaattaattatgtcattttgagttataaaactaaaattctctagggtcaacaaaaatagaatcgccaggtggcgatttagtccaatcaccaacagaaccatcactataatcttctccaagccgtttaatacaccacaaatcctcagcgcacgatagcactttccaatgcggtatccctcgccggagcggctcttcgccggcgacttctgccgccaccacgccgcatcctccttcctttgccaaattatgtgcatggtcacacaatgccttcaccattttctccgcgcgtggtccttctccgccgattccgtacataaaatgcagcccaaacggccggaaaaccgccgggatcgacggtattttcaaaaacggtagagttttatcaaccatgcgcgtcgcttttgaaaccacgcgcctcaatctcgacgcgccgcgaacttctaatctaaacgagtctttacaattccacacgcttaaaaccgcccacgagtccggtggatactccaagaacttagccgaaccgggccatgacctagacccggatccgtaacaactgccacgtggaaccgcgacgaatgttcctaacgagagtttgttattcaaaacagagtcaatgtcgcgagggaaaaactcggttgtgctaaaccgaagccggtatagtaactcagcatcagacggttcaagcttaattacggtaacccgacgagaaatgttgacccggtgtgcgtaaaccgggttaaccaaaatagacggtgtacgaaactcggcgtaaccacattttccggtgaaaagattgacggaagcgtgattgtcgttttcagttgcaaaataggaatattcagccccgttttgactaaaccaatcttccatagccttcacgagcttaaaccctatcccttgtctcctgaagtaattaattaaaaaaaaacgtgattagtttaagcgttaattactcgtgattggtttagcgttaaatgcgtgagatttaattaaaacgtaccggtgtgtaggagaaacgcggagacccaaaatgtaagcgagtttagtgtaaagtggtttggtaataacgacatcgttttgggatttgttatgagttaaatcaagtcttttggtggtgataccacatgtaacggttttgatacatccccgaatcattccaactaactctttcttctctttcggaccaatctcagccacctattacaaattccaattttaagttaaaaccttctttttatttaatagttaacaataataataacaataaaatattaataataataataataataataataataataaagcttttgggttagttagttcatgtaattgctctttatataaagaaacgggtttttaatatcttcggtttgagttgtaaccagcatgaggcaagaaggtgaatgtcgtttcacttatcattttttaattaattaactataaaacaaaacaaaacaaaccattttttattttgataaacaaacacaatcttttttttgtaagttaataattcgtatatttgcttcgtcattatgaaaagaaataagatttctcactaattagtgataaaatatattttggttaacaacttaaatttagaaaactgtatttttttatatattttaagatttaggtgttatgagtaatttaccagcatgaggtaagaaggtgaatgtcggacacggcaaatagggtcacctaagagatcggtgaagagagaaagttttccggctgggccaacttcgcaccgccgttcaacatcttctacagtggctaagtctttacttgggtcgtattctctaacctccacaagcaccgtcatattctctgttttctaattcctctaataactaaaaacagaggagattgagagagcgaaagagagagagagagagatatggagaaatgagaataaagtgtgaagtagtagcttagggttttatatagaggaaaagaagtgagactgttgcaataagaagtcagcagattttccgaggacataggattttttttttaatataaatataacgtgaggtataagcaaagaacacagaagctatgatgtgaatctaatgtttaagctatacgagctaagattttttaaaaatacaaataataagatttttaaaaggttttgaaaatgactcttggtattattttcggctgccattttagttatgaataacaaattaaatagttctatcattggagagagttaataggacccaatattaattccctattaattatgctcatttttcgcaatgttcattttttggaatatactgttttattttatatagtgaatttttcagtaaacaaatgaacgaatctagagggaattgatttcatgagatcatgcacagaggaaaaaagaatttggaatgatcagattagtagtatcaatacaataatctaatagtggagggctgagttaattattcttacttattttccccgtttaataaaatgattatttttgttctttaaacaattgtttagttaggaattttatacaaagatatcagagaacaactcaatatggaattagaataattttaaatgaaatagaaaaataattatttgtcgatgctatgaagtgagaatattaatgggtgattaagacgagcattgatatggaacttgctcagaaaagagacgtggaaagtgtgagtgagaagtggaaatggcggcttatggtttctctcactctcttttcattttctctttgttaattttatttgttcataattatccgtttttgcatgaacgtatgtataattgttactcttaccttacctctaatcatttgctctaagtcattgttattgataggcctagttattgacacggcatcataaatgagccgttatgttaataaaatacatatatgaatacgaaaggagatgcaaaaactcaacccccaaaagaagaaatatgaaacagaatcgttttgtatttatactacttatcattatacgaaagttaacatttttgtgttgacaaaaaataattaaacatttaactaacaacaataatttgtaaaacgagtcattggctgcttattaaacactacatatatgtaaatcgttgcagtaaaatgtaatcgtatatcactagacactagtcttactcttatcatcaatcttaaaagtggttaaaagtagtagaaacaaaatagtatcattgatttatttgtgtattaatatcttttactttttcttacgttagtaagaaaaacatgaccatgtatatataatatactcgaatttgcgtctccttgaattttcatgttttgaaacggacaggaaaggttacataaaaaagaaagggacaagaaaaacttcatgacttgaataaaggatatgtatcacgacaacattatagttggcaatataaaacaattgatatgttcgactcattaactagttgaaaaattccccttttataaagttaggctactccaatcacacaattaatcattttttaaaaatcgcttggtaatattcacctaatgaaatcggatcagaatgatggaattgtaatcgagaattattagcaaaacaaaatcgaataaatgaatatatcgtatgaaagtgcgtttggcaattggcatggcccccatttgtttccataacaatcttaagactttttaatcaaactcttctaaaagttcaataaaattagcaagtgtgttactaaagaacctaattattccgtcaaatttcaaaataagtatgtcgccttaattagtcaattgatgtgtatatcatctagatgcttatagacataaataatttggattcgattatatttaatctgtctattcatgggatcaagcattttttttctcccacaggattgtctaatcgtagattcccaccctttcaaaataataagatactaccaatttacgtatatcctaatatccatcacatattagttactgtgaatatatgatcgttattcccatttcgtatagaaatttaaaacaatatctgaatatcgaccatctctatctaacataaagatatatttatattactcaaaaacgcaaaatgtcgaaccaagcaagacttgagaggcattcaaatggaaaaatggggttttcataaacacaggattgtcgtgaacttttgttattatatagttgtaccaaatattttcttagttatttccatttggaattattctttgatgaggtgagtagtattaagttatttataaaaattgacactaaactaataattcagatcaaaatgtagatttttcctttgtaaaatacaaccatctcaatttgaatatgatgtgtcatctatagtcaatgatgtacatgacaaaagcgcttacgtcataggattcagaataaactaaaaagagagacgaagaaaggcactaatctaaggcaaatataacggtgcgtagtttcagatatatcttcccatcttaccttataatgttctccaccgtcacattcgtgtatgctagaaatttagtgttcctttcttagtttttgttcaagaaacttataacttctttagagttgctagtgttgagattgagtcttcgaattaggtttcgcaaaagaactatatttgtagacttatacgtattcttgatcctttcacgatttcaaagtaaaaagaaaaaacagaaacagaaattaaaaagtttgaggaaagtgactttagtcaagtattaaacggttcatattttcgggtttttacatcaaagttctattccagcaaattgtgttatcaatcaagatgtcttaaaaaaaataaatacaaatccgttttagtgattcgagttaactttcaccgaacttagtttagctcgaacactctattttacctagagtctttaggaccttcttcttctacgagataaagagatagtcttcccgaaacatagtctatcatgaacttattatgtcgtgttagataaaaactatatattttttgtaggttcaatttctttttgtcataatatatttcaaattacaagattaaaaagtatggtttccggtttgttttgaatttatttacttattttctgttaaaaatacttttagataaatatatacatataaactaaaaattctgtacaaattttcaaataaaatttcttaattccgtttagaatgaactaagtcggtttaacggcataatacactttcatatgttttttttttttttttttttttttgttgaaaacactttcttaggttcatgtatgaatacagcattcgtggttgggttgtctaatataaaatccatgagattagtgtatataaattaggtttgaatttttaaaacataacataagccatggaccacatcgtatgacgcaaaatgtcgagtgattagcagacagattagtgttttccggtccagtttgtagaattcaaacatacatatcatttcttgttatgattttaatatatgtacctatgattaattgtaacgaatttcaaacatacaaattccacgacaaattcctcgagatcggcattgaaacgatcttgatctaatccaatattattttgatgatccgtacggtacattatcacgtcctttttttttatacgtaaaaatcattttcttacatcggctaattacgaattactgaacagtcaaaaataatcttaatatgcaacagagcaagttaaaaataactagaatttaacgaattgatttttggcctatctaattaatgtcgttaactagtggagggagtgacattggattagttctgaagttttctaaagtgtatttttgttttttaaacagcaaagttcagaattatataaataaatacatactaattttcttagaatcttttttttatataaatattacatgtgaaaaatctacctaaatggctattcagtgttttaacaataactatttttcctccattgacatgtaatatgcgtttaaattggttgaaacaaagatactaacacaaactatagtagagaagtcattgaaattttttaagcttccatcttgtaatttccaatttcattttcacacaactaaaatacttaatatcaatataaaattcattattgctcccgctattccaaaatacttgatatatatcatttattatttatttaaacacaattcaaccaatataaacaaactacaaactataaatagtaaaagaaaccctttatcaaaagtaaaaataaataaaatttgtatagaaagatgagaatatcacttaatttgaaaaagagaattatctaaaacatcatttttataaaaacaaaacagagggagtatatgaaagattagtaatcaagaacaacgctgacatgtacccaaattcttgtccaagatataaaggctccaaccacaaatatatgaagaaaaaaaaaaaattttgttttagagctataaatttataatttaaagttaaaaagaaaagatttcttagcataattttataaatatataattcattatctttattttgtcaatagataaatactttacagttagatcttcaaaaattgaccataaaagaatctgactacaaagtagaaggtattatgccaacactttgattataatatgcaactatatgatagacacgagagtaatacagtacatttatacgacattcttgatactcatgcatacaaatttcagaacaaacaggtcagtatgaatttgaattgaagaaattaactgttgcttacgattacgacataagaatctttatgaaatcatcgaggatccataaaccatgtgatctttattgattattaacctatagattgacttaagaatgtacttagcttgtaaaccctaatcttgttataccttaatttattcagcatatcataacgaggaggaggccaagaccagtcaagccacgagccaaagttttttttagttattactcactgaattaaaagtagacctagacaaaaatgactaatatgcccgtgatacgtctcttagttgtgaaaatgaggtccagctgtgaatgttggagggggacaaagcggcgaggggaagagacaaaatcgtgttgtcgtgtaggagaaacgtaacgagataattagttgctaaggttatgtccaatcaaacaatgaagtgggtttaggttacggtcggagtgacttattatatgcatgagatatcgtcgtaatatcgatgtaattatcttcttcttcattttttccaacgtttgataaatttgaaaaagtctttaaactagttagaaacacaaatgaagagtaatagattgagaagtttagttctgaatgggactgcttgttgacaatgattacagtatgtttgtataagtcaatttgagagcaaccgaaagtttttatggttgggtaaactatgcatgaaatatgaaaacgccatttcaaccgcgttttcgaaatgatgatatcaaaacaatattaatgtaaaccacgtatttctcacaattatttcgaattttagactaaggtatttaacttcatacaatgattagtttttcaaaatcatttgactactatatcaacaaatacttgtattatggtaaacttaattaaatggtaagttttttcatgtggatttatatctaaaatctaggcatcatttcttttacaaatactcactagttactcataattaaccacaataaatgttataatgacaaactaatcatttttcttacatgtctaaatacacagttacatgaaagtttctggtatataaaagtaatttaaaaatatcttttacaaattgtttatgattagatagaaaaagagaggagaccatattcatgtgtaataaagtctagcactacaaccaaaaccatttaattggcatgtgtttatgtgtgctaaagtatgttaatttaaaattatttttacaagaaaagcaggtaattaatttagttaaatgtaatatttgtggtgagggcagattccgacacataggctaaggccttagctcgtccggatcccggagattatgcaccttgtccccatatacgcctctgattgactcatgaatcttgcttgtctagtgtctactacagtattacatgtagttaattatacaaacttatacatattcacgatatgtcactagtttaagagtttttttttttttttttttttttttttttttttaagagtgttcaatcaaactatactgacataatctaatccaaaccgagtcaaaataatcaatctaaaagccgaaccatatattcgtttacgtaattaaaaaatatatttaaacgatcaaatctgaacaagaactaaacgaaaaacaaaagaataaaccaataaaaaacctagttttcttaaaatgatagatttgattgaaactagaatatgaacaaaaacaaaaattcgtaacaaactattcataataaattatattatcttttgtaagctatattaataaaataaaacaatatcaaaacttcaaaatttgaagaaaaacttactgaaatttgccttaattaaacaccttcaccttgtgacctccatgttagttattttaaaatataattgtactttttgttttgtacattatcaaaagagttctgtgcttgaaatgacttgagactatagtacttaaatatctatctactcagagatattgctttcagcatatatttcaacctaaatattatctcgtaattttagtatctgagagttttgtggtggggagataaatatgagacgcaaagcaaactagtggataggaacgagagacaaaacaaaagggcattaaatagatgctacaaaagctttttgatagggttgtagctagatatatatttaaccttgcaagaaaaatctgttatattaaagtaccatcaattcagattattattgaatcgttatttgttactgtctccaaccatcttttaaaaaccaattcatcattcagatttgcgattagaatgtaagatttaccgaagtaagtgaatagattattattatttggtgcaaaagtgaatggattattaaaaaccagtttctgtatgttcaaaaagacgaaatcgctctactaagatatatggacttagaatgatgacgtacgattcaactgcggatgaaatgcgatgcggttctaatagtaatgaaaaaatatatatacacatatatgtagatatttgatatctcatctgtcttggctaaggacgataaaaagagagaaacatggaagtgagacatggagcgttgtctactgctaatgagaatgaggtcatcatagcttctgccatttcatcactctcgtcttgtcaaatcaacgccattcattatcatcatgattcatacgcatcccatgcatggcagacataagaatcaactctctttcttgatgacttatttagataatctttgttttaacatgtcgtaaccatgttttatgatgaaatttacggaacatggacacattaatattaacattacattaatttacgtgtcaatgagagatatataaaacgtttaggaacaactaataatgtagggtaagaatggcagcaatgtcattatgtaatatctacgactagtgacctacgtataagcacatcaaagtactctaattaagttttttaatcaaccgacgtcgacaaaaaaatattgtgtcccgatatgcattcctaaaaccacacaagttcatatgtatatatactaaaaaatttccggaaggtagattatataaacattgtaatgtgaacctgttgattcatcagaagtaacatcggtctaaatatcggtcggttaaatatgagtcacatattattgtacgtgggtttgagtcacatcgatgttcataaaaagattttgatttactcttaccaaattgtaatatgattcgttaggtcttaaactccacaacttgaacaaaagtatctttacatactttccactcaagatagaactaaaaactaaaaaatagtagggaagtgtgaagtgtgcacactgcacacgattgtacacgagtacggtggttatatagagtttgattgattcaaaaagatgatttgtgattttacgtacatgtataatgtattatcagtggataatttcaattcaaatctagaaaaattttgaaactgtagatttcttactcaagtaaagttacaaacatacatgctagacgatcattgttctcatttgccctgcatgcttcctttgatcacgtgttattagttcaccatgaatctacgacattatacagaaattattcaaatgatagaatgacacgttcaagatccgatgatcccatatctaaatatgaaaaatgtaacgtttcaatataaaaacaggaatgaaaaacagaaaaatcttttttatttttttttggccagaatgagaaaatctttatcacacgaaactgattatctaaagcattccaacagaatacatcattcaataatctcatttactcatacgcgtgaaatctcactttggattaaggtgtcaaaactcaaaagataatcttaattcacaagactgcacaccggttatcaaacgtttttaatcgtttccaaagtaaatatttatttctcttttggtggatgattttctccaataatttgaaaaaaataactgattgatggatcatggatgcatatatatactgaaaatcttgcacaattattagttatatatttccatatttggtttcatatgttttagacacagcaatatctttgcgtgtgcgtaattcacaaaattttaagagatgagtaatttttttaaggcatcattttcaacaagaaagaaagagacagacagctatattgtaaactaatataggatgattgcataatcatttggacaaagggaaccagagagattaaactaaacttaaaagatataagacagataggtcgaggttgttccacagacacagtactcaagatcggattacgtgcttaatgtcccctaatcactatttggattagattagagattcttgtgctttcttatgtctacagttatatatctaactgaccgaccatcactctctactcccgatgcgagcttcttctaccttccacggagctgtcaaaacgggctaactaaaaccggcaagccaaaccaacctgtcccgctcaagaatatgaaattttccagaaaattaaaaatgagaagaaaagaaagaaaaaccttttgaaacccgtcttgtggatatttttttttatataataaaattcaaatgagttgaatgaaacactgagaaagagcaaaacagtaacacacgcacacttgagagaatgaaacaatgacagatcgatttataacaaatttgaatccgtaaagaaatgaaaaatcagaagattgaacaagcaaatgttttcgagatcactggctgcgcggcgtacggctgctctctgcatttctaatcggatagaaatatggatgcgcctgtaaaaatccatcatattctctactatcacttatctgtaattataagagaaaatctttagaaagatattaaagaaaaattgttgcttaccattgcttctttagctgttggcctttcttggtgatcatatctcagcaacttgtccacaaaatcaacagccttcattaaccaaaaagtatatgaaaacaaatgagtcatgttcgtccaaaaaatccggtgttttggtcttaacatgaaggcttcataattgtatagagaaaagttaagtgttgtacctcaggaactgctaagtgctggttttcagaattgatgaactttgtccatggcttccggctatgtctatataaaatcaagagtgcataatttaatgttctgaaatgataaggcgcaaaactggagtttttagagtttttcataactttttaaaccggattacctgcccacgagggatgttagattagggtccaactctatacggtatttgtttaggtaggcgttgagttcatctgtgccaagcacctgccatagttataaatacatagaatcgtatttttagctataacttggaggaatgtaaaatctgttcagaggagacgagacatgatgaaagcttttgtaatgttaccttcgcaattttgaccaattgatcatagttgtcatggccataaaagaacggctccttgcggaatatctgcaaacagtagagtatacaatattcaccacttaactaacttaaggaatggtaaaataaccaaaatgtactgtcgaattcttgtcattccattacagcttaaaccaagttaactaaattctagcttaaaacgcttaccattccagcaaacatacacccaagactccataggtctaaggaataatcatagtcctgtaaatccaccagcagctctggacccttaaagtacctgctcatcaaatatgaagtgagaaatgataatagtatacatcagctagacgaagttagataatatgtttcaactaatctcaagagctcaatgcatgcaatcttcaacatttcttatctagactctctatgagcagaaatttagcaactgcaacaaatagaatcttgcagaggagagattagcagatagccaaaaggaactaccttgaagcaacacggacattgtattctttcccaggatgatagaattctgccaaaccccagtcaattaaacgaagttttcgctgctcgtgatcaatcatgacattatgtggtttcacatctctgtgcatgattccacgtgaatggcagaaatccaacgcctgcataaatgttaaaaagaaacaacaaacagcatcagaaacaaattcgtaccctttataactgaaggctagtggattcaaaagtcaagtaaggtaaacaacagtgtatgacgctatacatctatgatatatctaccgattacttttgccaattgccaaagccgcaaagaaaatcatggtctacaattcaggaaactgaataattacctttagaagttcaaaaatgtaatatcgaacatcatagtctgagagagttggatagagaactttgaaatctttattgttcacatgttcaaatatcaagctgggcgtcttagactgctgatctctaacaatgtcgagcaattttacaatattaggcccaccgcagaggttctgcagaatcttaatctctctcttaatctgcgtcaaggagaagcaaaatatgttagagaataattcaaaccaagtgaagggccagaaacacacttcattctgagcacaattgagataaaaacaagcaagcggctgtatctactcaccttcttcttcttcacaggcttcaaaatcttgataacacatttctcgttatcagtagcatgaatgccttcaaagacctcactgtattttccccttcctaccttcctcaccacctcataatcatcctgtacactgcggcatcaatgaagctaactcaaacactaatacaccaaacagtaacaacaccatacaaactcaagatatcaattcaacaatctagttcacatagaccagcaattttcaagagattatatacaaacaaaacagataccaatacaaacaaatcagataccaattctgcattacttacgagattatatcatcaatcaaaaatatgaaacgaaaccctaaatctacattccacattgattccagaacaaccaatcccaaaccaatctataaccaaaggcaaacatctagaaatcgacgtaattaggtttaattagagaagaatctgaagatatacccccattgaacagcaagggactcgtaatcccaatagtccttaggtctaacaacgttgacatcagcgtaaaccctagctttcgacggcgcaccggcacgccggatagatttaccgatcttctgagccagcgtttctgatttttctttcacgcgcgattgctgttgttgctgatgttgttgttgttgattccggagatgttgacggtaaagagaagcgctggatgcgaaacgacggagattgtcctggagcgaagagagaagaagattcctcttcgccggagacgacgaagagaaggagaggagagagaagagattgttgttggcggcggaagcgttgcgaagagaggagattgtgaatccagtacaaggccttaaggccattaatgtctttttttaactcttattcagaaaatgaaaagtgaaggtaacgaatttgctttatttctctcctttctttttctttggcttctcttcgaaacgatgtcgtttaaacaattcggtccggttatagtgtgattgaaatcgatccgattgggtttgtttcggttcgagtgtggttgaatcggttcgatttggtttaggtggtttttgggtatcagagattcttcttcaacctttttctaatcctgcacaacgcacttcttctgttgtcatcatcatcgtccacttgaaacaaacctgacgatcaaagagaagattgcgatcgcaaatttctccattttttcagatcgaaattgatgtcgaaagctagggtttatacagatgttaacgttgttcgtcctaaagagtattgggactacgagtctctcgttgttcaatgggggtaaaacttctagctttagaatttttctttgatgaatttacgatttttgacttctttttgataaattttcggtggaatttgattgatttgttgccaaatcgaattcgaaatcagagaaattggaattttttagggtttggacttaggtctcttgaagacactttgttttaagtatctattagcaaatattggattttgaaattcaacagtgtgagattcttaaatacttttgtgtgattcttcagtcatcaagatgattatgaggttgtgagaaaagttggtagaggaaaatacagtgaagttttcgaaggcaaaaacgtcaatacgaatgagcgttgcgttatcaagatcctcaaacccgtaaaaaagaagaaggtgatcagttagtagaactcatttctgatgaatttgcatacataaagatggctaattttgctgaaacttgatgttatgcagataaagagagagatcaaaatacttcagaacctatgtggtggaccaaatattgttaagctgtatgatattgttagagatgagcactccaaaacacctagcttggtatttgagtttgtcaacagtgtggactttaaagtattgtatccaacattgactgattacgatatccggtactatatttatgagcttctgaaggtaatgtatcggtatttaccataaatgacttttaccgtacatacaaatgtttatcgtggaatccagagctgatgttattgcatttcaggcattggatttctgtcactctcaaggaataatgcatagggatgttaagcctcataatgtcatgatagatcatcagctgcgtaaacttcgtctgatagattggggccttgctgagttttaccatcccggaaaagagtataatgttcgcgtggcctcgaggtaatatccgataccacagcttaattccacctgtcttggcaagcctaagagggtcattcgtagatgccaatgattgaaacttttagctgtgcaatcaaagcttcttgtagttgttaaatgcattagactaaaaacctgtgaattaattgccagatacttcaagggtcccgagcttttagttgatctacaggattatgactattctttagacatgtggagtcttggttgcatgtttgctggcatggtgagaactaataatcccctcactcttctctctagcttcaatgctgaagctattgcaagcatttgaatttccgaatggtagtcgttaatactttgctgttgcttattcacttgtcaaatattgatgctgcagatattccgtaaggaaccgttcttttatggccatgataatcatgatcaacttgtcaaaattgccaaggtatattgctagtctatgacttattggcataaaattacattgtaaacttaaatccatgtatatgatttctgattgaaacgtgtgcataggtgttgggaaccaatgagttagatcattacctaaacaaatatcagctagatcttgaccctcaactggaagcacttgttggaaggttttattccatccctgaatctctctgtctttaaaagtcaaaattgttgctgttctcaactctggctcagttaattttataccaatgagttaaaacctgaagtcactcttatttgtagacatgtccccaaaccatggtccaagtttatcaacgcggacaaccaacatttggtctcacctgaggtactactctttttcgaaaaacatagttttgcttcgttctgggtgtattgactcattgtatacatctttaggcaattgattttctcgataagcttcttcagtatgatcatcaagacagattaaccgcaagagaagccatggtaaaaatcctcttcatgtgcacacatcttttgattttgttttacccgatgatcttcatgtgcacacatcttttgattttgttttacccgatgatcaagtcaaacttataatctctggtttctctattgatctataggatcatccatacttcgctcaagttaaagccgcagagagcagcagactacgaactcagtaaaaccgaagcttgattgatgatgcttactactatttttcaaccaaaaactttgtaatgattttgttgtatcaaaattgtggtaatctttactttcatagaaacataatcaacagcgaaaagaagccaacttatattaaaaaaaaaggttccacacaaagcttcattatataatcatagcaagagacttattgttgaaacaagtagagagaaatagaaaccataaaatttgtcgagactttgatacaaacataggaaagatgaggatccatacgttatacattggaatcctttatagttgagataatagctttcatcacttcttgaggtgagggaaacaagcgacaacatcggctttcggatgcttcgcctccgcgtgctccctgcatttcacttccgatgtcgtgcagatgaatgtttgcatacaaaccttgcactatataaacacacacatcaacaaataacaagttaatataacacaaagcttcaggatcaacaagaaataacaagttcattaacacaaagcttcaggatcaacaagaaattgtgcatcaacatgagacaattaaacttacgtttcatgactacataaacaattccaaaggactaataataattggattcttattaagaaaagctgattctagtaaccaataattgtaatatttcgatgatttcgaagacgatgatataaagtaataagtgatcacctgaatcgacatagctttcttgttagcttccaattggctacctataagagagatcaaatacaaaaatcattaagaaacacgattttacggctaaaatctccatctttgaaattgactaaaaacccctaaaattgaatctggttgttaccttttcctgcagccttagccttctccaagtttttggcacgagccatggctgatttctgtgcgtttcctccacccatctttctgatcgattagaagaagaactcaaaccctaatttttcagaagaggaagaagagaaaaatacgaaatggaatttttatgccgactctaatgtgaaaagatttatatgagaaagaaaaaaacgatgccacttgattctttttctgtaatgtccacttacatttaattcgcctactcaccaatcacctaaagttattttggattctagataattcaacataatgggccttcggacttattatccatttaaggcccgttaaaacaagaacctttaacgtttaaacgactgaggttttttttttttttttggtctgaataaatcagttgaccaacacacaaatatgttttcaatctaaaccaagaaaaagattcttttttgctaattgataacctgtacagtttatcttattcaaaggaattgagacactcactcattcatgcaaaatgataggattaatattattcagggagtgagtggtttatattgttaacttctaaaaaaactaaaacaaaacagaatttacaattaaaaaattaaaaataaaggaaaattatttttttgttgttttaggacagactctagtaaatgtcaattttattaggtctctataagctataacctacacgatttatcttcttcaaaaaaaatgagtcactcactcacacaaaatatgaccgctttttattgattgcacgagctaactactaccttgtctattgagtataagagagcaaatgatggtatagcaatgaacatcgagatgatactaagaaagattgtccgaagaatctcgatagtagttcgagctatcaaactttagaggtttaactcacactaacgctcgtttagtagacaactcgtcagtcaattgatttcacccggcgaatgagtggtttctattgttaacttctagaagaattcattttgattttttctagatgattccgtaattttgacatctaacatatgatttcatcatattcttttcggccaaaacatgattcagaaattttaacataaattcaaattgggcaaaaaatcaaaatttggaaatgattattttgtaatttctgttttaaattattattgtgttttgatgcatatgctataaattttatctcaaaattatggcttcttgaaatctggatttgagaatcttgcatatttcatgttaaaccttgaaaaatatgcaacatcatgaatcctcattatccattagttctcataaaatcttatctattttactgaaatttcctaagtatttgaaagaaaaacctacaaaatcataattttcatcaacatcatgataatttggatttcgcaccaaattcgaattatcttgaaaattgaactccataatcttctagtatttccattggtctcacaaaatcgttgtggccaagataatgttttaggatcgaagagtaattaaaagagcgataaatattttcttaaaaagatctaagagagattcaaatatctaaaaaatcaatttttcatatttgatatacatctttggcgattagttgcgttgtggtgaattcaaacatctagaaacaaccaacgttaaatctttgctatgaacttgaatttttttgttgcacacacatataagaaagaaaaaaaaaagactaaaaaacatgttcaaaaaaatgtgaaaggcgatgtcaatggtcaagaaatattatacaaaaacaaattgtaacaaaattttgtgtagcttacttcaacttaagactattttttgggtgggatagttattgggccttttggcctgataataatattgggcttcatttctttttgtgcaccacttacatcagtcaagatctcaaattctctccgacgtaattgagtttttttgtttgttcttttacttctttctccggctgatttaccggtgaattttggatcgatgggtgtcgttattgagacctttatttgggaaccaagctcaagcttcttcatcttcttcttcgtttccacatttttatcgatatctctgtttccttacttggccaaaaacagaacttttggtagctttgatcattctatttcctcttctttcgctcggttccagagatggtttctagctatctacactctctcttcaggtacatcattagatttcttcagttgggtctacagatttttatctgtatctatggtgctttcaatttctggtttcgaaagctttcaacttttgccttttctcgtctatcaaaatggatcctttgctacaatttgaattctttgattggaatgtggcagtgatggaaggtttattgtcagtgtatggagaattggagttaacaacttatggcttaagtaaagaatcaatggtgttttatctctgtgttggttattcgaccgctcttgttcttggtcctgtacttggtgtggtttctgatctcatgtaagtagcttttagtaaaatgttgatcaaagtgttttcattttgtgctagtaatgataaataccgaaacttttgtagaggtcagaagaaaatttgtctactctattgtgtcttgcaccttattgttggtgtgtggaagaggattacaatgagtcctagtgcttggtttgcaaatgtttttctctcccttgctggtcttgtatattcatttgggtttgagacttggcttgttgtggaacatgaaaaggtatatggattggtcattgcatttgagtttttattattagataatcaatgttctgattttgtaatgatgttctgtgtcttgtatctttgtagcaaagtcagaggaatgactcgttaaatgagacattctggttgatgacttttcttgagtctgcatctttaattggaggtcaagttcttgcaaattggcttgtgggtgaaaatgttcaggatgggattgcattatctgctacggcgtctctgctcttgtctgttgtgactattatttgtattgtccagactgcaaaagagccgttgaagacccttccgtttagggattattccacagctttctatgcgtatgttcttggtggtaagattttgtcttcatctattcagttaaaattcctgaaagagtatacgctaatcttagcttgttaatgtgatcagacaaaagaatatggtttctgggaacttcacaagcctgtcttcagttttccactgcagtcttttggattctgtgggcaccaacaatagtggtatgattaagcttcctaatataatatttgcagttgcttgaaccaaattttatatttcagaaatcaaattagcaatgatggttactgtcatttgatgtttaggacctccagtgattccctaattggcctttagatgataaaattattggtatttatttctcgacaatggaatgattaaaatgagttatgtttgtttaggctgatgggcgtgaagtgaatctgggattgatatatccatgtttcttgggttcaagaatgcttgggagtactgtattcccatggctaatgagtggacaatcattgctccggcttgaagattgcttagtctacatatacgcactacttgggatagtgttttctatagtagcctatgattatcaggtaacttatttgcttgtttcacaaaagtgtaccagtgaaaaacttatttgcttcatatggaaggcctcacgcataaaagaccatatcctgcaggaaatccgaatcttagtagtacttttctgcttatttcatggctttgctggactggcacttcctttgcttgcaagattaagaacaatgtaatgctcttatatatttttccttattattcatcagagacattctttgttagtagaagaacctttcttctctgttgtaacggactgttatctttatttataggtatgtaccaaatgaattgcgtggagggatgataagcctctctcaagttccagccaatgcagctattttgtttttcttaatccaggtttgtgctatcaaaaacacaattgttaacctattttgcttctgtttctgttaccttaccgatcttaatattgcagagaggctactctaacaagatcgagaactcaacaatgatggctcttggtgccatttctttattcactgcatctggttgtatatatatgttgagacgatggggaaagtcaccacaccatgattggcacaaattatgatcctgagtaactcgtggtctctggttatgatacttatgcggaagcaggacaaggcaaaacgaagataaatctactggaaactcaagttggtctatgatcttgtgttaatggtctcgcttcgattttgtagcagcatgaagtgaggaaacacaaaaccttggaagttcaaagatgcaatgaaagcagtataagaggtttgattattagtttaagaggattctattattttaaatgattgtttgattcatgtcttattaagatcatctcctttggaccttttaggcattattgttttactagtaaatatgaatgaaatttttacaagttacaagtcaaatctgaattatcttcaatcatatgtttggtctcttatccatttggtggcaacccatttctcacccttgataacaggacagcttccatgtagagatgtctgcaacaacaaacccaaaattctgagaaagatcaaacattttatgtcttaaatgaggtttttgattgtcaggaacactaacttgatcgatcgttccatttggaaacaaattgtagaagaaaatggcgtctccttgtcgcggctttactttcagaccaacacacttctcataatcatatcttccattcatatttctcccattctgcttccacaaaaccattctgttttacaactcaaaatcccaaccatgttaaatcgaaagaaagaaacaatgattacctcgaatgggaacatcgtctctccaccttcttcgacactcgataagaacaataggaaagtcacgacctgcattcatatgttgagccatgagtggaggatcaacagatggtagttttgaatcaactttaataaaatccgaagcaagaaaacgaagttaggttgcttacttaccctttggcttattaggggaccatactctgctgaatggaaagcatcataatgtgaatcatacttctggccaagctgatacctcaagatgttgaatgactggagaataaacacaagaaggtcttattaatatattcataagtaggtcttattgatcatatatgcattggttttgtattgcttacttcgtaataatctttggggaatcttgtggctaaagctattttctcttcgatggcagctaaaaccccggattcgtcttcatcggtgtgctgatgaagactccggtactgcatttgaaaatgtttagtttcttgtaatggtcattgatctactaaggctatccattttcaagaattgagtcttatgtaagttttctttaaccttgttctaacgttttgagtggtttctgcggtttcacctttccttaaagcaagcgtagaaggcttaagcttaggctttgccatatcgataacggcttcacattgttgtttcgttgcgaaattcggcaagtaaaaaactcgaggattccagcttaaaccctgatcattccacatcaaaacatgtaccaatccttgtgaatctgatgaatctaaagttatgagagttctctttatattgttgtagatttgagaagtaactgacatgaaaaggaatgttagagacagaagaaccatgatccaaagaatcagtttcatcgttaacagatcttcttgttgtcggaatctcactgaaactaattccctgtagaaaacagaggaaacagagttcttaaaggtcttcaacggaactcgatgatcgaagattttaagagagaaagagataaagaacctgagagaaaagattgaagaaacagaaaccgaagatggccaagaagaagcaacacgcaatgaaaacgtacggaaacactaacttcttctctttgccatatgatctcatcttgacgaagattttcttccttcgtgtggagacttagaatcagcgggaatttgaattctgaaacagagaaaaagagagagagagttaaaaagagagttaccaaagtagaagatgtgtttgacagaatctaaccaaaactttgtgttttttttcttttttcttttacaaagcaagtcatttccagacttattagatacgtttaaattgtgtgctatgaacagaagacaaaaagaaaggtataattaatactaaaagactaggatttaacccgtggtataccacagggcaaatattttatttatatatataataatcttaaattttacgattttaaatttagtattaaaattatataattttatattaatattgtaaaaaaaaaattagtgatgatagaataataaataaagatttaacccgtgttatatcaatgcaaacccgtcgcactatataactcgtctcataatattttaatatctttttataaggataaatattaataatattttataaagttaaaatatatcaataataatataccattaatgctaatagatctctttaaaaaagaatattagtgtgtagtacattttagatttggaaagatttaaatgattgttgtgatatatttattttaattctaaattttagtaacaaaattgatttatatttagatttgagaagaaatttgttaaaatattaaatgctaatggcattggatggtaaataaatctcaacttgaggatttatttcataaaagtgctgcaaaaatgtatatgtagattttttaataccttatgttgaactcttgaattaaccaaaactggttaatatattgggataacattgcattgaaattcttgtactaataaatattgggacacattgaattaataatttagtatgttctttcttttttaaccttctttttttttcctaacaaacatacagtagtacattttaaattgattacatttaaaaaatattaatgcagtgattcacttactgtaggtgccaataaaaatttaaaagaacagttacaatctctcccttttgcgttaccaaaccagatcttttccaggttttaggtcatcacaaacggccaacacaacattttgatcaaatactcaactataaaaaaaagacgaagcattacaaatccgaatgaccagaaaccttaatttaacaaacattcaaattgtgtgacctcataccacgttgactgtcctttagcttacgggctctatcgagaagtcgtattagtctagtgataaaagagtgatgaagttcacttgaggccttgaggggtggtgtttgactgttgaagctcacttgagggacttgagctgtgctgtttggctgctgaagagttcacttcctctgctctcatagatcttaacttttctaacacaacccaaatcacagtaaacattatcttggtacttgaataccgaaatgtccgtacaacgtacatgacatacagagcaaaacggtcgagtgttaccatcgttaagagcaatttcaatctctccttcttttccgacaaaatgttggggtttaatgtacatgtcatttcccaataaacatttcagatggagagtgactctacaagagtcacatgtatagaaccactcgctcgcatctagttttgattcacaaatctcacaccagtattgaccacttgttgttcctttttctccatagcaaagtgtgagtggatggctatcgtgcttgtagtgtgctacacttggcaaagtagcacattcaactcccagaaaggagtcgcagatcaaacactctaagtactttcttgaacacgcattactacaacccatgcatgctcctttggtcaaattgatgtagatggggtgatttggatggctctcatggactgatgtatcaggaaggaaagcacacttgacatctacctgaaagtcacaaaattctacgttgcaactgtacacgaaacccgtactatgtcggcgacaagcactgcaagcaaacatgccttcaacagaataaccatcaacgtaaagctgaagagaggggtcacttttgttaaggataagtggatgcttgtgtagcggatgatgttgtatgcgaggaagacatgcacatgcttcgtgaagaacaaagtcgcagtccaaacaagtgtaaaaagtatcataaatcgatattggaaagcagcacgccttacaaaactttttttcaccgcgatggctacccttcccttggagttttagatgacatgaatgagtgaaatgatgtatcgtctcctcatcaattcttacgaatggttcgataacttcttctggttcttcaggcacatcttcgagatctttgccgtcccacacgtttttattcgttgcacatttggaatgtgcaccataacaacatcccttaatgcaagaataatgtccgtagctaatgtcgatggttttacgacaaactccacaagaaaaatcaccggaaataagagaggaaatgagagacaggcggtgttggtggcgggtgatcttaatgacacgaggtagattaatacaagctctatgaaccatgtagttacaaggaagacaagcgtaaactggatcatgagcgtcattgagagacaacccacaaacatcacaaggtaaagggattcgtctaggaaaaagagtgagaatgtggctgtggctttttaggtgagtgatagtgagaggtggtggctttatcgtacaagtgaaattgaggctgaagttgcaaacagaacaatgatagtatatatcttcaaaacgtttctgacaacatttgcattttccataatatatatctgatagatcgttatcgtcatcatcatcatcatcgtcatcatcatcaagatcaacatcatcatcatcatcatcttcaacatcaaaaaaaggactaaaaaaacgagcacgacgacgaagaagacgacgacgaccaccaaactcatcatcactgtcaaaagaaccttctgaatcagaggacgacgattctccccattcttgaggtatcttagaggtgtcaaaattaggatctaaggagatgagggtgagtgggtgagaaaggtgaagagggtgtttcatctgctgtggtaagacgtgacaacctctatggaattccaaattgcaaagaggacaaaagtaatagtacctttttccctccaagtgtttgcctttgcatccgaagcattcagagagttgagactgacttagtaaacggcggcgttggagcttgtgcggttcaactggatcggagaaagggcaaaggtgtttagttggtggccgttgctgctgcgtgttgccgccattgccaaacctttgccttacagatcgaatgttatgtctagatcgcagcttgtccaagcggcggcggaacctgtttaagggaagcttcttccgcagtgaagccatatgggtttgtgtttgtttacaattggataaagaagcagccaattttatcattttgtacaatccattttagacttgaggctctcacgttgagactcattttgattcaactattcgatgcttccagttccagctgtagttttgtttttttaacgcgctttagtttacgaagggccgagggccaataatttggctatattttcgattatacaaagacaaccactccttattcttctatttaattgataatatttagctgtaaatatcatactaatattatttgaataatgactattcaatataaggtaataaatgactagatcatgatcgttctcttgaatgagttagtgaataagacgtttggtgagaagtgttgacatacaaaatgaagataattttgttcgtgttttttcatgatgcattgtcattcatctaccattcatcgaatttattttatcacatatatatgaatcagaaaaagaaaataaattttttcaggtagatggaatgtccaatataaatttattgaatattagtattatatattgtaatagtgaaattttgtataatatttctgtgatcatataactttatataattattatatttttagaaataaatgataaaattataaagataggctttcttgcacaaaacgtcaaaaacaatcgtataaaacttaaaaacttttaatgtttttttgtttttttttttttaaattgcagatgcttctaggaccctagtttagataacgtaaatcttaacataaaagtcacgtatatcgagaagcttactaattgccaccggtataccgcacgtgtcagaaatatacgagctatacgtgagctatataagcagcaagtgtaaacctctcacgggcaagcatttagcaaaacgcataacaagatggaggatcagaaaaagccaccaacgaccgagcaagaagtgaaagaagttaaaaacgacgacctcgagtctatcaagaccccatacttggactatgataacttggaagattacaagatgaaaggttacggagcacaaggccaccaagagcctaaactcggtatgggaggtggagccaccgatgctcccactccttcaggcggtcttggacgcggtggaggcgctgcatcgacggatctttcttctaccgatgcgattaaccgtcagggcgttccgtgaaaaactttattataggatcgtcaacaaacacaaagggtagcttcgcttgtctaataactgatcaagtttcggttctttaacgtgtttcaaaaaacaaaaaaaaaaacacttgtaatgcaagttttttttttttcgtgtagagtttaatgctaaataattctcaagtttgaaatgatatcataccaaataaataggaacagttttaggacctgtttcgtacttcaattttctcatttcatatccattcatatagtttttttttttttatagttaaagagatacgaacctaatcaccatcttcaactctattcgtagttgtagattaaggagctcttccaagagattcattctataacttcttttacatcttggagtactatgtaacaaccctttttacacttccaaagagtccacactacttctatttttaatttattttttcgtcaaacactaaggttttccgttagagatttagagtcatttataaaccacggaaaagcagaatactatgtcaacaataatttaagattttttctcaaatatttacatggaaaagcagaatactatgtcaacaataattaagtttttttctctagcttctatatctgaacctccaaggcatgttacactcctcctaattatgtagaattggttgctgctagttcaaccatatatcttccacaattaattataaatgccgctcctctgattttctcaccaattaaagaagaatcactaaattaacatgttctagtctcaaaaaaaaaaaacatgtaatagtctcaaggatgttctaaatgaaaaggctcaataaaaccaaataatgaatcatcacaaaagctatgtcaacgaagacaaaatgcaagtgtggatatttttcagaaactgcgtaaaacaccgtgaaaatcatcttcttcttttttttttttttggtcaaactctctacagagtttatcaagtgatttttaccggtacctgtttttccttgtttggttcaactcaattattcgccttaaacccactttaagaaaagcccactgaaaagcctactttaaaattcaaccaaaaggcccataagtactacagccgacatcagcagacaacaagccacgtcgatctcgaggaaccgcgtaattaacgtgtcggaatcacacgagccaccgtgtactagatagctccataaaagcagacacatctcatgaagcagaacctaaaacctttaatagcaaacgaaaaataaaaaagaagaaactaacaaaacaaaaaaaaaaatggaggccgggaaaacaccaccgacgacgacaacaacgacggagaagaaaacggagcaagtgaaagacaacgacttgccgaccgatagcccttacatggcgacgggtactttggaagattacaaattgaaagcttatggagccgaaggtcaccaagagcctactcctggtcttggaggtggctccaccgatgctcctactccttctggcgacgcacccgccgccactaccaccgatgcgaaagctccgtgaaaaaaaagaaagactataataatgaacgggttttgtggatcgtcggaaaacaaacccataattgtagtatgttcaataactgatccagcttcgtttcttaacgtttttatggtttaattaaaaatgtatttgcgtctaatgctgaatgctaaagttcgagtttcgtatcaaatgaagttgtaacgatttaataattaatgtgaagcttatttctttttgataatgaccaatgttatctagttttatctccgtcgatcatataacttaatttattaatttagtatttcatcaaaattgaaataaaaaaaatcgaattgaaattatttagttcttggtcacaaagccaactttggtattcaatccaaatatccgatcttgggtttttgtttggaattttatgaatagtactatccaaaataagaacattatctgttgaataattgatgcgttttgggttttttacaataatattagatcgatactttctattagaaacaaaatcattatctattcccgatcatactagagcgtcttaattaattaatattctaaagagccggtgatcatcatgatgtgtgatgatgccaagcgaagtcggtggctttgtgactttatggtacgaacgaatattttgttgaaggggatattttatttgcccacgtacacgtggttggtgatagccagatcttggacttaatctcaatatgatatgtgtgtgcctcacaaattatatgtagtcaaccgataaagtatatatataaattaatcagaaacatatatttattagttaaattaattaaaaatttatagatttttttataaaataaaataagtttagattagtgtatatggttgctacgtgctactgattgattcagttctctgattacaaaacattgtgtgtatagcaaaaattaattcagtttgaaattaaatggccatctttagatgttatgtttgtatactttggtttgggtcgattaaatcagctttttacgaggcatgtggctcatctgttattggaccaggattttttccattgggcgtggtctcgcaaatacccatcgacaacgattttttccataaccctttgaaacataacatggataaagctggcacagtgaaccataaaagtatcatgttgagttggttcggttcggaccaatcggttattaattgcatgtaaccaaaaaaaagcatgaacaaataaacttaacactgttttgtaaaaagtcatatgtatgtacaatgcttgtaaaatgatttgttcttctcaggaccacaaaaataaaaataatggcatcatcgacacgccgctgctctcggtggtaatttccatttgtcattgtctccacaatggcatatccacttccaaaaattaaacggttacaaaaatggatttatactaagactaaagtaacttgtatatgcaatgtatagtatgtagtgtaactgtgtaagtagtatcatatggttatatatacattatgtggtttgatatccgatccgatcgattcatacttttgttttaattatggaaaaatgcatgcaaagtattacttgtccaccattgtgattatagagttgaacaaagtaagactaatatttcccaaacaaaaacataagcaatctcgttagaaaaacaaatctcaaaataagaatatcactgaaaagaaatttttgttttcgtatgcgtgtccatagcggtgacggtgatggtggctgagatgggaccatcaccggaatatgccaactctccagctgtttatccgtctagcaaacaaaaacaaaaaatgccgtagaaaaccaaaattaggaaacaaccaaagatattgggcccaatgccagactgggcctagctcaaatattacaacaaccacacataatttttatactctgctccaacggctactaatcaccgtaggtcccttcaacggtccagatctctcaaatattttctcctatatacaacatgcaaagatacatacactcgagcattcttcactcaacactcactttttctctaattccttaattctctcaactaattacaaattatgactcgcaatattctcttgacggttacattgatctgcattgttttcatcaccgtcggtggccaatctccggccaccgcaccgatccattctccttctacatctcctcataagcctaaacccacatctcccgccatttctccagctgctccaacgccggaatccacggaggctccggcgaagactccggtagaagcacctgtagaggctcctccttctcctacacctgcttctacacctcagatctctccgcccgctccttcaccggaggctgatactccttcagctccggagattgcaccttcagctgatgttccggctccagctctgacaaaacataagaagaagacaaagaagcataagaccgctccggctcctggaccagcttcggagcttttaagcccgcctgctccgcccggagaagctcctggtcctggaccaagcgatgctttctctcctgccgctgacgatcaggtaaataatatatgatttaacctaaacaatatggtaaattaatttaggtaatatgtaaaaatatcacttaagtaaaaacaaatgtaaattagtcccatcttttgactatagtttaggttattcgttataatttaaaaatgtctgaaatcacaatttttttgttagatttgattctttctagtttctagaacttaaaatttcgaattattttactgcagagcggagcacaaagaataagtgttgtgatacaaatggtgggagctgcggcaatcgcatggtctctacttgttctagccttctaataaatttttgttcttcttttttttttttttttttttcaattcttaattttatttattttatatcttttttgatcctctcccatttgtctcatgtattacagctcacattttgtattcagcattttgatatattatttgtcttttatgtatacaaataataattttaatacatgctattttctgcaaaattactgttctcaattttgctaattatcacatcaatggtaaaatattttcactcatttcatattcacagctacactgtcttatgaaatcagaaagaaaaaaaaaaaaattctattccaaatcaaagtttattatgagaatcaatagaaaattaaagaatacagagaaccaacaaaaaatcttgagtacgaaaaaattatttgcagaagagacctcttttgtacaaaatcactactttggtcacaagacaaaacataaaaataggcactgagagaccagaatctgtgcatcatcaacatcatcatcatcatcatcatccatcatcagccacgcccagcgtttccatgccgttggtttctgaagtaactgagcaacgcctgtgcctgacaagttacaagattttctccaaataaagaactcttcaaaacaatcaaagtcatgagtgtggctacttaaattaagaggaacatgatatattagttataaagtttgtaccttttctctagctctaggagtaccagactgtgagagagcgacgagtggaggaacggcgccttcttgaagaaccatgttgcagaaccgaccactgttggttgaaagttgaagaagagctgctgctgcgttttctttccctctagctgaacccaactcaacgacttcaacaagaagagggattccgccttcttgaccaatcgcgtttcttccttccggaattgtagctagatttgccaaaacagcaactgctttatccaccatcccagctgctgggtccatcagatcaataagatatctcacagcacctgattgcacgatcatcgccttgttttcttgatgtatcgatagattaaacaaggcagtagcagcgtctttcttaccccgaggggtaccgttaccgagaagatctacaagaggcccgattgcacccgactgaccaatcttaatcttgttttcttctattacagagaggctgaagagagtagcagctgaattctccttggcttcagagctcccattttcaagcacgtgaatgagcggctcaattgcaccagcatcagcaattgcttttttgttgttgtcattgatagataagttgagaagtgcggtaacagcgttttcctgtgtagctgagtcagttgagtaaagtagttccaccaataagacgattgctccagagttcccaatgactatccgattatccatgttgtgcttggctagcaaccttagttctgcggttgcttgtctctgagtatccaatgagctgcttttcaactcctccaccaacttcttaacttgagtttcgacctcagaaagatcacgtcttgtctcattcgaaggcgctgaaacaatccttgaaccgagtctctctgatggacgtcgccaaaattgaccacgggtacgtctatccatgaattttggggaaaaatcagacaaatctcggcgagtagctgctgaagtggttgcagcaagaggccctgatctaatttctcctgaagcatcactgctgtaaggtgtagcatgagctgattcttctgaattctcattcgcatctgcccttggaaactcctcattggaaacagtgctagtagcagaaggggacctatgatggtggttctcagatgtttgtccattttctactgagcctcgtgtagttgaagatacagatgacctaccaggtgcatctgtcctcagttctcgagaatcgtttgatctatcttcaaaatcatttagtgatcccctcctggcgtccaaaccgtaaccatttccagatatacccggtgaagaagcacccaaggcagaagcaggacgtgaaggagaagcaccttctctttcagttgctcggcttgagaacgagggcttaccggtttcacttgaagaagcatcccaatcatgtgacttgttgctaactttacgagcagaaacatcagcacccgtgctaggaatggagtctgtacatgataaaagaggagaaagctcatttaaacttgttgatttattgggatcaggcagcttgacatcgtttgtctcacaccagttagcgattaaggccttcacggtgtaattgggtattagagtagtgtgagtcagggtctgtcgagtcttgggacacacttttaaacccaaatcaatccatctcttgataaacgccttttcatatgtttgtcctgatgacacaatcactggatcagtcattacttcaagtgacagagggcaaaagaagtcggcaagaatggcgacactagaagtctgagtctgtttgatcagaagaagacgttcatgcatgcggtttacaataacaatcagttggtcaaggaactcgacttctgcattattctcagactgctcagccatctctttctgcctctctagagcaacagcttcaatcagaatctcctggtttgatctaagaccagtgttctctccaattttcaccaagatctcagggctaggtccaacaccatctctctgatccctcaaagcaccgtcaatgacagaagatatttcttcataactaagatgcttaatcttctctagacattgctgcaattacgaatatttgtaaattaaccattcgtatctcctgcaatttgattcaatcgctaatgtggacaacacaacaaaacataaagcagtcagcatcactacgatcaaccccttccacaaaattcagtaactgatccaatttaatttccaacctaaagctaatgttctgaacagaccacatatctatagcatataaattgatacaaatttcctctaaatgtaaagagaaggtacctcaagagaagctgggcttagctcatcaggtagatggttcttagaagacatgagaaactgaaaagtatccacaatggtgtcccgcatctttggtagcaaagattcaatttgaagaacctagacgtagatattaagaggctatcatcaacgaaatgatttatcagtaaccaaaactcaagcaagagtgcagaataacacaatggtcactaatttgatcttaaaaccgtcacggattcaagctaaaggcaaaagaaaacttccgaacaatcataaagcaaactaatctatgcatatgttaaaactctatatagctaagatacaacctgagacgagaagagaagtttagggacttacgaaatagactttactagagaaagcttgccaactcctgaaaagatcaatggattgatcaacatcctgagtcaattcttcaaatgctttaccaagtttctcatcaaaaacaaaatcagaggtaacaacaacatctgctataggcttcaacactctcaataactcttcaactctcttatagtacttctcaaacgggtctaaatcaatatgtttagaagatgacagatttagaaacgacgagatacttctgagaagaacttccatttccaccctgaaaaagcaacaaaatttgaaacttcagatcaaaagggttcacgaattaacttgctacgaatcgaacaatcaccaaaaggtacgaactttatggaatccaaaacttttctcttgaagaaaattcaaattcaaatgtaacccatgaggagaaaaatcctgaaatcttacgaaattgatcaaatgggtgtctcggaaatgtaatgagcaagagctttgacgaagagaggttagagaattggaacagagaaaaaaggggtaaaattgaaaaccctaagtgagatagatagatagatcgaaactatacgagagaaagagagaagaaagaaacaaacatgcacgtgaagaagaagggaaatcaatctttctcggtcttgcagattatagttgagagcacgtaaaacgcaaatcttcttcttcttctccgtgtattattatttctgattagccaaagaagaaggaaaaaaaaaagattcgacgagttgtttgggtctgcaattggtcagatcgaaatttgctggcgttttaagccgttctaagccgtttcggacattgttttgtcagcttggtctcctccactttgtgttttgtcttttttttttttttccttcaggaaacttacaaaaatcaatcttttgatagaaacttttaaaatatacaaatcaacccttagattacaaaaaaatacatatattttaactaattgtctaaatgttatctaataacataaattatgtatattgaacaattgcatactaacgacactctagtaacaaatcaatatatatatgtgtgttttgtctacgttatttgattattgacttcttctatattgttagatcatagaaatataacaaggtgagtatataaatataatcatatatgaggtgtgattgttctttttttattattatagaatgtttgattgttctacccacactttttaactataaattgtctctcaaatcatatgaaactttttactaaaatcttacgataaaatcccagttttccaataacatgagatttgaaaattttataaattatcaactgaataaccacagatttggaatgttttgataaatactagatttcaatgagactggattttaaaacatttcagaaaatgatgaccagtccagtaaggtgagattgtttttatggaataaatcatcccaaattactaatccagtatgtcccttaaatgtaaaagttgaacgttgaatgagcttttttccagaacagcaccaaatattattgaaacaaaatattcctttaataagatgccaaaacaggaagaaaattaaagcatgagcaaaacactttgtataaataagcatcttttatctttatatatatatcacccctaaaactaaagaacaaataaatcttaaaaaaaagttcacaatgaattgtttttcttattttttccttgttattatattatgtgcaggattgaataatgcgaaattcaacgaaaaaaactccgtaatttttaagagttctcttggtccgaaaaaacttctcaggattcattgtacatcagaacacgacgacaccgactacgtttacctgagacatggacaaacttacgcattcagttttcatgatagtgtcttgaaaactatatttgattgtgagttaaagcaaggaagtagttattataattacaacttttatgcaagatttagggcatataaaggtggaggtctgatagttcactacggtaaaaagaacttttgggatgctagagaagatggtatttacttcacacatggtaaagaaacacctaaattagagtataaatggatccccggggatccctctatgagagtggagagccccctatgagagcaaataatgtattaatcatctaggtttaactacaattttatatcttatgttcttgaataaatctattgaataaaattttataatcgattaagatagttcatgttgttggctatacatctctaaatttgagatgtgttatcatatattgtgttatacatcgtgaagctgtttttttttcttttaaatatattatagtttcgaatttaaaaaaaaaacattaatagcataggctataatctagttattaagttttttttttgtttttgggacaaaactagttattattattaagttaaatccattacaacaaacatcattagcaaatgatgaaagatcttattaattattatctccaggacctatctactgatacatagaagagccttcttcaacaaaactagagctgctttataacaacaacacatataatacaaaagagaaagctagaactcatgatcctaaggattacaagacatagctactacactattttgtttggcccactctcaatgactagactccgctttaaatcgccaaggagtgaaagtgatcatgccacgagcaatgagatagatgatgaatgcaccatacgaagctgtgaacacagtcacaaaaaccggtatagactatgccatgacctcattggagaagaactccaacaatagataaccgttgatcattattacgagcgcagcaacaagccacgcgattgtttgcacaactaggtgaatcgagcttaattataaagcgatctttaacgaatgtagtaaaagagtttgaaagaaatcgacaaaccttgtacaaaggaacgatcatgaagctaccatgatttgttccttggagaccaaacacaataatggaatcagtgcaaatgggatttgaatggactaagcacgttaagccactcgtttaagacatcgagtgtagcttccaatgaatcaaacactagagtaacattaacagttggaatgataactcaatttcgtgtgatcaaagtagtagttttaagtttaaatagggcgttttttattttaagaaacaaaaaaaaaaaaaaactttaaacaaaagtagtatgaccactcacagcaacatttagtaatccaacaaacggaaaaaaagacatcgtttagctcttttaatccgagctaatccttcagagcccccaagttataaaaagacaacattttctcggcaaactataaaaataaaagatagtaccacagctcacttaagacaattaactctcagattcaagcaaaaagtttatttgataaatgattcaaactgtcgtacgtacaatctcaacatgaactttaccgttgaattgcatagctctttacatgtgtccttccgattaagttgaaacgaaccttcttatatctcttttggaaactgtgaaatcagactcagaccttgtttgtttttcatccaaatgattcatccaaatgcagatgaaaaatgatgtttgttttttataatttaacaagtatttggatggatcatctggatgatacatctgaatgagtttctaaatttagacaaatttatgaaattcatttagatgaatttgattgaagcatttggatgaagatggtttattcaaaaataacaaaagacagatatacccttatttataatcataaattaaatcatgttattttctatagatttcttaattaatatttttaaaattacatattgaaacaagaaaaaccgcaaaatcatattttcccgccaaaaccacaaaatcatttttttgccaaaaacgtaaaatcatgtttcccgccaaaaccgcaaaataatgtttttcccaccaaaaccgcaaaatcatggattttccgccaaaaccgcaaaataatgttttcccgccaaaaccgcaaaatcatggttttcccgccaaaaccgcaaaatcatgtttttcccaccaaaaccgcaaaatcatgtttttcccgtcaaaatcgtaaaatcatgttttcccgccaaaaccataaatcatgttttcgcaaatccgtaaaatcatgttttctcgccaaaaccccaaactcatgttttcccgccaacatcgcaaaatcgtattttatcgccaaaaccgtaaaatcgtgtattctcagcaaaatcataaaatcatattttcccgccaatatgtttagtattgataatgggtaatgatgttgaataattgttatttgtcaaaatgaaagcatgaacatttttatctaaacgagaatgtggatgaactacaaaatgatcaaacaaataaagatccatttaaatgcatcatgtagattaaattgcaaataatgaaacaaacatcattcaaatgtatgatttaaatgaatcatgtaagtcgatcatctgaatggaaatgatgaaacaaacagggcctcattgacattgaaaaccttcttgtagcatcagaatcatcagctgatttaggtatctcttgtttcgcgtgaccttgttatttagaaggggctctattaagcagtttggacgaatcagatttttcaagattacgtctttaacccttccttttcttatactatcattgtcacccgagcttgatgagtcacaaatcttgtatgattgccttgccacaataatccttataatgtaaaacatcattaaaaagccatcaggtctttacaataaatcttatcgtccacaaaaacaataatttgccaattaatggaagaaattctaactgaagaatcaactgtacaacctgtcaattaagaaacataatttaagaaacatatctctttttttgtctgaattagaattcaagtcaatttaagaaacatatctctttttcagtttttttgtctcaattagaattcaagtcaatttaagaaacatacacctcgtaaaagttgaacgttgaatgagttttcccaaaatagcaccaaaatatcatcttttatcttcttcttctttttttttctaaacatcttttatcttatatatatatagcccctaaaacaaaagaacaagtaaatctaagaaacaatgaattgtttttcgttttcttttattattattgtgttatgtgcaggatcgagtaatgcgaagttcagagaaaaaaattctgtagtttttaaaaattctcttggtgtgaaaaacgttctcaagattcattgtacatcaaaagacgacgacctaggctaccactatttgagacctggagtacaaatctacgaatttcgttttcatgatagtgttttgaaaactaaatttgattgtgagttatggcagggacgtggtcctacttacaagttttatgcaaattttagggcatataaaagtggcggtctgatagctcactacggtaaaaagaatatttgggaagctagagaagatggtatttacttcacacatggtaaagaaattcctaaattagagtataaatggagccccataggaaagcctcctagcccttaagagagcataaattgtgttaatcatgtatgtcttaactataataatatatcttatgttcttcaatgaatctattgaatgaaaatttataatcgcataatttttttgttactgttggtggatttagaatactttcttttgaatctgaatatgatgtaaatgttttaaaatttattattatcatgaaatataaattacacttatttggagctcgttcatataaaatgcagaataaacatgattttaattttacatattctagataggtagaataccaaaaaattagtaaatgagtttatgggttgactcaacttatttgatgggtcaacccataaactcatttaatttgatggattaattgattaataactagattaaaactggcgatatacggagaaataatttttataaagttattttgttttaatataaatatgattgaaagaaatttaaaaggctcttagatttgatattttgcgtttgcttagattttattaacttttactcttttgtcaatgtattaagttttacattaataaacacattttatatatttacttttacaaaataaattgttgatataaactcacaatggtttgttaataaacattcccacataatatagttcaaatacatataaacaagttttttcaaatgaaaggccataaaggccatgattgtctgaaaattcgattgatgtaaagatttttaggatatgtaccatctccatttctaaggttttaaagagttataaacattataattcatatatttaaaattaagaaaacgtttataatattataaatatttgaacatataaacggttatactgtaagataagtttgtatcaaaatacatttttccaaaatcccctaagtaatatttgttcttccatatatgtaatcagacatatatatatatatacataaaacatgccaatatctatggatttatctcttggctaattcacctcacttatcttagtagattttgtgtgttttgtttggtccataattttcattcaaattaagtctcagactcagtcaaaagaggagcaaatacaatccaaataaagggaaaatataaggtaacaaggcaagaaatgcctaacaatatttcaaaagaagataaactagggataaatgcaagatacaacacaaaggaagctaagcgagattgaaacaagtcgatcccaatgacttcatgagagactgcatccagtgcaatccgcaaactattgggcttcccaagcccatttcaactcccatttactatgatattgttttctttgggtctacatgctcaaacctgcaaggatttgttattgggatccttcccaaaagatctcttactagttggagttggacttggcttatatattagaaacttattttctaaacttcagatgtgggacgttggtttgtacccaacaatctccccttcaaaccaaggaccacgaacatgggcgtccccttcagagaaaccttgggaccatgactcgacaccttcttatttgtgaggttctcttgaggtatccttcttatcgtgttacatggtaggcttctcccacaccgattatacagtccaagccctaggtccatttttttcaacccacgttcaacaccatttattaggctttccaagcccattccaactcccctttagtataatattgtcctttttgaatctacatgctcaaatccgcaaggatttgttattgatctccttcccaaaatgtctcttactagttgaagttgaacttgcttatatatgggaaactattttctaaacttcaaatgtgggacgttggtttgtacccaaaacaaaccactccaaacaagagggaagacaaagaggcaatgaatgccaagatgagcaagactgcacttcccaaaatacattaacaaaaacatagatgccaatgtaatagatcgggacaaagcccttaataatataccatattagaacaagtagattttgtgtttatctatggaaattttggttccatcattttaccttgtgtatcgaatttgccctgactatatccacaatatgtactttaaagtatttgagaatccttgaaactgtgaaactctgatcggacgattaaatgtacacttttgggaatgttccccaaagtttcttttgatctgtgtcaacattggtttagatgtgaacatattcttattaattctcgtctctgggacctaactactgatacatagaagagccttcttcaacaaaaccagagctgctttataacaacaacacatataatacaagagagaaagctaagaactcatgatcctaaggattacaagacatagctactacgcttacactgtcttgtttggtccagtctcaatgactagactccgctttgaacggccaaggagtgaaagtgatgccacgagcaatgaggtagaggatgaatgcaccataagaagctgtgaacagtgtcacaaaaccggtatagactatgccactaacctcattggagaagaactccaacaaaagataaccgttgatcattatcacgagcgcagcaacaagccacgcgattgtctgcacaacaaggtgagatcgagcttaataaagcgatctttaaagaatgttagtaaaagagtttgaacgaaattgacaaaccttgtacaaaggaccaatcttgaagctacccatgatttgttccttggagaccaaacaaagtaagggaatgagtgcaaaggggatttgaatggactgaagcacgttaagccactcgtttaagacatcgagtgtagcttccgatgaatcaaacactagcgcaacgataatagttggaatgatagcgcagcttcgtgtgatcaaagctctcaaccatttcttcattttgaaattaagaaacccgcccattatgaactgtcccgcatatgtaccggtaatagtgctgctttggccagcagctaatagcccgatcgcccaaatgtatagtatcgggaacacaccgcctccatatttctcctgaagatactgtcccgcgttaaccaaaccgatgctattggcgaggtcagtattataaaaccctttggcgaaaacagttgtgacaaacagattgatcaaaaaggagatgaaaagagcaattgtggattctattgtgtagtagtttagcgcttcttggactcggtatttctgtcgtttatcgacttctctagattgaacaagagctgagtgaagaaacacattgtgtggcattataatgcaacccacaactccaactgctttctgtatcgttcttgaactcagtttcggtaccaaaatccctgcaacaagagaaatctaacttcttcagaacttaaaaagttaaaagactgttccattaagaaaatgataaagagaagaaagaaagcctaaccaatgagaagctcagagccacttggcttagcttgaccaaacatccaagcgaatgagactcccattgtagcgataagaactgcaaacacagcctcgagcttccttattccgtagttctcaagaaacaagaagacgaaactgtgaccaaaacacatacatatgaatcaatgagatacataacaccaaaaactcacaccgaaagatgaaattccacgagacattaacacagctaatcaattaacacataataatttgagcaatccatagaatagattagctaaattacaattagaaccataaacactcactagagtttcctgattccaacaaaaagaccaaaactttgagcaaaacacacatatgaatcaatgaccaaatgagcacatagtgacaaaaattcatgtgtaaagatgaaattaacacagctaatggttaactaacaccaaattcaaacaatccatagattagattagctaaactgctattagaaccataaaccaaaaagacaaaactgggaccaaacacagacaaatgaaacaataacacaagaagacacatgtctaaaaattgagaatttaccaatcaagagcagtaataacaacaccagcccaaagaggcaaaatcccattactcaaaatcttgatagcaatagcactaccaataacttcttgaatatcagatccaatcaaagccaattcagccataacccacaaaaccattcttgcccaagtaggatactcatcacgacaaagctcagctaagtgacgacctgtcgcaacaccaagcctagccgacaaaagctgaaccaaaagacccattgctgttgcccacatgagaagccataacaaagagtacccagcaaccgcaccggcttgaagatctccttcgagattccctggatctaaaaacgcaatgctcattaaaaacccaggtccggtgaataaccatagcttcttccatgagaacggtggtgcgccgccgcatccgacgccgtgttctagatcgtcctcctcttcgtttcttacgatatgtaccttctctgtttcatcgtacgctgtttcttcttcttcttcctcgttgattagaagtggctcgttgttctcgagttgtggcattttttttggattctctgtttcagtttcgggttttgttgttttcgaggttttagtttaacacgttattcttacttgcttttgctttttatagggaagttctgtttctcttagtacaagataaagtataaacacaaactttcaaaagaatcttaatcactttatatttttctaataatttagggggaaataagatagggttttatttggtggaggtaattcggataatcactcataaacaaataaataaaattttgatgtgtaaatggaatttggaaaagtaaattcaaatttctcttttctagtttagttttgtttgtttttctgggacagattttacatttaattcgcttatttacttacggacacattttttcactatctttttttttttaaatagagaatttttgtagaatttctttggactaataattaggtttataattttatcgagcgttcatcaacatgtagattatataggaagcttcacacttcacagtgttcatgcatcacgtataccttcgtttgtggcctcgtgtgttaaaaataaaaatgtctatcgtagtccatagatatgtatagtgtaaatagaatccttttcaaaatattaaatagattcgataaatttatcatttttagtataattagatcattttttgtgataaagtaacatgcgaaaatatttgtttttaaactttgttttgcttcaaacatgaataaactatatataaactgtttgttgaatttattaatatattgtaactaatgttaagatttttaatataattatttatatttctgtcttcttaaaatatttctatactatttaggagtattgtttcctcgaacagtatatatcaaaatcaaaaagcatgtatagggaataaaaaagcaaataaagaaataaacaggtggtgtgtatcatgcgaaataaatggtccacttaggttgatgacctggcgagatcgaaagaaccatggggatgatgccatgtcatgcaatagtgggaaccaagcctgatattaaacatggttggctcgtggatacacgtctctcacctccgatattctcttcttttttttttcttggtaaatttgcaaaagatatccatcctttcaccaattttttgtaaattattctttacacataattataaaaaacaatcttttagtgcaacttctattgtcaacaactatgttaaagttacaaagtttagaaatggatggcacatagattacaaatataatgttatatggatatagtataccttttgtgctaaattatctatttaattgttcaaagtacctgaattataagagaaacaaaaaacaagtacatatttaatgttttcattaaatgataataaaagatatcttattaaaatatgtatatactagattttcacccgcggtataccgcggagacaatttatactttaaaattagtatatataaaagtttacaatttgtaactatctatgtaactatctataaaatatttttattttctagttaagaattgttattaagtaacgtcctgccaaacccgttccgccaacccgtcccgttttattttattaatgttgatcttatttatcatatgtttatgaatcatttatttttaaaattatctagtaattaaatgctatcaaatatctctacggtttgatgattataattgaattgtaatagtcatgcagaaaaacaatatcaataatgataattttgtagtaattaaatgatattaaatattttgaaagttttattttagtaaccaatcgtgtagttaatgtagagagattttagggaaattgttaaatatcaaatatttaattcgaaatttttttttctaattatcaaaaacaaatattaaaatccagtggcaaccattgtaaataagtttcaactacaagatttatttcacaaaatggctgcaaaaatgtatatatagatatgtatagttaatgtttgcatgctcatcaaaatgcattgtgaaaagaggtgaacatgcccgtgtagtttgttatctttaccaattcatcagaattctaaacaacgcaaacttttatataggttcactatattaaacaacaagtagaaatcaaagataaaaattaaaaagtcaaggatagataatctttacttgatttccataaaaaagtatgcatttctatgtaccaaacagtatttttttcttttgaatataattttgcattaaattcaaaaaaacaaattctaaaagattattacgtgtttatcatctcattttaaagaagtctgctcattttatttgttgatgtttccgggttatttttttttggaaaatgataacaacataattttttctctcgaaatatttagttgacatagttgttcgtatttttttctctatttttacggaccattttgagtatttttttttttgaataaatacatgtatatgtaatgggctttatttagaatgaatggcagacgaccaaaagaaaaacagatggcacaactttcaaagagcaatctacatttcccaggctgcgcgaagatattatcctatcttatgtttcacttttcagcgcagaagaaatatgaatctctaaaaacgtaaaactccatttactaaaaaacaagaacacttttggaagtatgaaaaaacatatacgcttgcttgaagaagcaaataaatttgatatttatccgtgaagatgtatgtacgatgtatatggagtataatggacataggaaacatcacattgtcgaatcatccgtgaagatgtatatacatcaattcagactcagtttaactttaaaataatttgacaaaaaacataacatgatatgtgtaaccatgtatgtagaattagattatatagaaacttcgtctgaggttcgctttgtgtttcaaaaatcggaatcaaaagctatgaaaaagcatgtatccacgcacgaaccaaaacatgtttaatatggcccctctgaaaaacactttttaattttgaaaaaacaataacaggcttttaaaatattgtggcctaaacatattagaattgacaaaatatttggcccccagaaacacttaaaaatatagtggccctaaacccatagcccgtggtaaatttactgttgatattatggatgattggtaattggggattttaactcgcttgtcatatacaagtacttttaaaaaaaactactttagaaatatctcattaatttcaattacacagagtctctgatccagctactttaccagtaggtctctcaaaatctatcaggaaaggaagcagcaagcaagaccatcaatctcaacattcaggatctgcctcttgatattatccaaatcagagacttgtcacatatgatcgagtcatgattctgataggcacttgttttttgttttcctttttttgttgattaaaattaaaatgaattcgatgtgtttaaagctttgtcctaaaaacattcatgagctctattacgagacattcaacctctcgaagacattattcatgagatgttttttctactctatgcctaatggaaattctataattatcagttgctgaaaaaaatgcagactatgcaaattcgctaagattaacgtatcttttatatccacgtaacatatattgaacagagagataatcaagatcgattgtacatggaataatagtagagcttgttatgaacaattaattgtctaaaccgtaacaaaccagaactttacaagtaaaccacaacaaaccgaaattcataatctcatatagcaattgaccggctcggacgttaaattaggccatatttctttttcttaaccgactataatcgaaaatatatagctagctagggtttctctaggtcttaatacataagttttcaacaaatctatttcttcgttcgatcgcaaaatcatgaattc

SEQ ID NO: 270 - DNA, 108881 bp, Arabidopsis thaliana
aagcttgaatggtttacacttgacagagcttttctgatatcttcaagtacttcatcagtgtttctctgcgtgatatgcttatgctccattaccgctttcaagactatatgaagagattgaggtaacgaatctgacttgatatcatctttgggagatgcatcaggattcaatgaataaactgttccagaagttttagttgcttctgatgaattctcattagattcgttctctaccggaccagtagctgaaatagaatcagaagaacaaataggagaacttccaggtcggttatcgattgtactagcaaccattgcaagcttctccatttcagcaaaatcatccattagtttcatctctgcagctttaggggttccaaccaaactcgtgcccatttccttcttgttcttgaaattgtccaactctgaaagtaaagcagaagcccaggaatcggcacagctaactttatcatcattgtcaaactctgttacggatgcaagagagacttcatgtgacacattgctactcctgcttggctcaatgtttgtacctctagaagattcttcaagatgagactcgaattctagtagtctagacgctgttcgagaatacatatttctcgagaactgaagctcactgactttcttgtttaaggcttcccttagagttttgttctcttcttccagtaagcataattgttcagtaaggttattgattttttcggaatcaatcatcggactatgagggcttccattgacccttctccttcccaacatctctacttcattgctcattttagaaagagcagcgggtcctggtaaccgtttcctgaccagaacccgtaacctttgacactctgattctaactttgcaactttcttcacattctctaagtgcagtttatgcgatgcttcagcagttcgacggctaaactctctctcttcattccgaagctcgagctctttctccagcactcgaacttcatatctcaatgaaacgttttctttctctttcgactctaaactactcaccaaagaattgaaatcaacctctatacggtccctctctctgtttaaatcttcaacagttttgttctttgctaacaaagcctttgagagttgagcattctcgccttctgcttcagcaagcctcttaccactacctgccaattccgtctttataacaatcaatcgccgttcgtactcctgtgatgcttttgtcaaagcatcatgcatccttcgctcctgctcctcacgaacaaaacgaagctgctgcacacattcttttagaccagcatccgtgtgactcgacctttcctcactcctgtgtttttcattcaaagcttcatcaagtttctttttgagagatgctacttcagcttttgtcttctcccagcctgttaacacaaaacgcaaatggaacaggaagccacatgagaccgtgaagagcaccaaaatcgaggaaaataaggtttgtagattaagattcagtatagttaccaacaattgcttcttgcgcctcagtctcatgcttattgctctcagcctccacagagttaagcttatcatttagacttttcacgcgatgttccagctctatcttgtcagccacaaccttctcagtcgaatgccaagaacaaatgaacaatcaagctcatgaatcagcaaatacggctaaaagcagatgagtcaaaaacctaactcatcaagataatcttagctattacacaagtttcacaatcatgggtgtctcaaactacatcacaaagcttgagggatttttcttgacaagtttaacctcaaacacaatgagctaaacaacacatgaatgtcaaacagatcacactctgatactaaacctaacatctctaaaagatacataaatgagcaaagaagatccattccccaacctaacatcaaacattaatgttatcaacatcatttccactaacctctccattgctttcaacaacggttttctccattgatttcttcttccaaggccatgctttatggtccatttattacctccaacaagccacacacaactactcttgaaacttttcacaacatcctattacacagaaagcaaaaaaaaacagaaaaactttaaaacatctttacataaactaaacccataaaaagacacagattttttcttgatttgtttgatttctccaatcccacatttctcaaaatggaccaacatttacaagcgaatgtgactcaaacccaagattgaggacaaaaaactctcattgtcctaaaaattcccaaatcacagaacaaacaaaattcttcctacaaatgtataaatagaaagcatgagctaatctcgatcaatggcttatacatgcacaatacactaaaaagaagaaaaatccaattcataaagtttaagactttaaagagaaacccatgacgaatcacaataaagtcatcttttttatctagccacatttagaagatttgaagaaaacccattcataaagatcaaaactttcctcaccttcttaaccaatacttaaccgatcctctccaagaacacaacactggagactataaaaacagagaaagaggaaatgaagaagacaaatgaaaatggttaaggaagaaaaagagttaaaacaactttagagggagagtgagactctgtgtagagagaggatgtgtcgggtaggatctgatcgaaatgggccacgtacgcttaatgaacgttggatcgtacaatattttatatcactaatgaaaaaactttgtattttaagggaaacatgtttatgaatttcatgaacctcggaattctaatatttaaacattttaagctgatttttcattgaaagagtgattagtgattagtggggaatgcataatgcttaatgaataattaattgagttaagtgtgcaatctaatcaactttaagaaaagtgtttttgttgtttaccttaccatctctatcttaagagttaagaggttggtttcttttagaattgaaaattgactttgaactaataaataattagattgtcgaataaaatcagtatttttatttttatttttcatttttagaaaattaatccaacaacaaaatagtagttgtcatcacacaattccaaactactcttcaattaatatatgataacttctaaaatgtgaattgattactatttggtggagatcataaaagctaaatccgtaagaagaaattgtttggagctttttaagaaattaaacttgctccatagattgtttggatcatacaagtatattgtgattaatgttacttatcattttgcataatctatatttttaatgtatcgttctaacaacaattatttatttcaatatcaaatagaaaaataattatccatttcaatatgtatattgaatgattcttttatatcttctttttttttttttccttctatgttttggccttaaagttttgtagtttcttttttctgtttatgtagcagattcttcttgctaaggaaggagtcttaaccaacatttccttaattattagctcttaagatgtattttttgctaatcactttattaacaagcttacgccttctttgtttagaaagaacttcaaattgtggacccaattaacgatttaattagacaactaagttttaggtgaacaatctttgtatatgaataacatgaaccaattgaaacaaaatagtttgagttgcgtctaatagacatgcatccactattcattcactcttttttccaatgtgccaactaacaaaaaaaaaaattgtaagtctcgataaaaaattaaaagttctatgcacatatcctacccggttcgcgatatagtttgttcgtcgctctagttggatgactaaaagtctgactaagtctcttctatggtaaggtatctaaagatttgtatgtggtaaaaaattttggccataccaaaaaatcttgaactataacattttttcaatcatagtcatagcgatatgatttctatgaaaagaattgggtccagttagcttgtacgtcctagatttttaaaaagtttagtcggagctggtgcaacatacagtagacaatttttcagatctgataccacatacatccaaccaggccggtcctatgttttatgtggcttaaagattcttaaaacatactttcatataaattttaacaataaaaattatattaagatatcatataaggtactaaaaataattacatatttttaattaagtgtaaaatatttttttaccaaaaacaaaagtgtaaaatattctacactttatgaaaattaactttcaaaattatttgcagaaaattattattattttttgaataaaaagcaaatctcttatttttttaaaaaaacagattacaaaaaccaaatatcaaaggtattttttgccaaagaaaaaagaaattatactattaaataaaaaattaagtgaaggaagaaaaaaagaaattaaccaaaaaaacaataataggaatggaaattaaatgccagaaaaccactataatggaaggtataagtaaggattcgaactcacaacatctgacttagacgtggacaattaaaccaacaaactaaacagagaagtttgaaatatggcctttagattatgtttatattgtgtagcctaaagcaagtgcttcacctgctttatgaacgggccgggtctgcatccaacaatttttgtttccattggtctctaatcttcttcaacatcatcctatagatttgcatgcaataaatattcttctcgtatttttttgtcttccaaaacatacacataaacttaacttaatattgagatgtaccatatccatgtggaaatctctacctctacaaaatcaaaagttccacatcgacaaggtaaaaaacagctatcaagattttttctataaatgtaccacttgtttttatcttctttacgagtcatggtccatgagtttgtgttgattttactacaaagtaatttactattggtttagaattatgaaaattggtaatcacaaaaaatgatacatttataatcagttgttaatatttgtgaaaaactaaaattggattaattagctaatgaactatacatatcctaatttcatcaccttctcgttcaaaattgacaattaccaacaaataactaaaaacttaaatcaatcataaaaagttttaaactgagcgcaaaattttgcaacagtaaaatataatccaacaaaataaaataaaaccatccttttttaagtcaacccaaaaaagtaagaagtcaaaacagaaacaatcatatcgagcaaaaaaagtctaaaacagcaaatagattcccgcaaaaatttgtcaatcagagagagagatagagaggaagagagtcaaagtaaaaaaaaaaactcgaacaaaagcttctcataaatgatcattgatggaaagtgaagccaagagatcacttggacttccacttttgttgccttcacttccctgtgaagatggctgattcacgtttctcaacacatctaatgcctctgaaactttggcatttagagcctctggtgactcgagcagatgcaaaacctcggtctgatccatttccagaagcataccagtcactttcgcagcgtgctcactctctatctggtccactaatggatatagactctcaccaagaagctacaaaaaccccaaaacaaacatatcgaatgtaagtaatcttattttttctcctacatagcagcaagtcaagaggtattgagagagacttactgttctctgttgagcaggtgtagcattagcaagggaagtagccaattgaccagcggacataggctgactatacggcattacattcatgtcataagcaactggaaccattcctcctggcattggaccgtcaggcatgtttctaccaccagaagggtaccggtaccctcgtcctcttggcatcatctagaggagagaagaaagcaaagacttatagattcatcttgatctgggatttaagacatattctcctttttttataaactaacctgtggctgcatgtaaggcattggctgctgatgctgatggcgcatgggtccatcacctgaccgtctgccacctggtcgtggaccttgctgacctggctgcatcatcggtccaccaaaaaaggccggcctcattccaggaaccagctgaggctgatatccaaatccaggctatatcacagatttaagtagaaccaagtgagtgcttattgattgaaagagtcccatattcaagcagagttacatagtggtcagttagaacaaaatggtacctggtgagggatgattggtggaggtccttgaccgtaaaaaatctgttgtccaagacctggagcaccacctgtaaatattggcattcgaggacccacaccggggataaaagcaggtctcatttgagaaaactgtgcctgaaaaagaaacataaggacttgagacatagcaaacataagtgtacgtaggggttgtttatctatggtgggaagtactacctgcagcttagccctcctttcttctttcctctgtgcaagagcaacatacaacggtttgccaccaaccattttaccattcatttcattcagctgcagaagaccccaaaagaaattgaatcaagaaagaaaatagaggctcaaaacaaatttaatattgtcttgacacaggattatttaaattaccactcttgaagcttcactggcagcagagaaggcaacaaatcctgatcctttgctagtaccactagggtcccgcataacctgtttgttacaaaagtatgaggttccgatcaatcaagagacaaaaaaaattgcatctctcatgttattatgtatgcggaaaacaaacaatgctgaccttgcaagaggtgattgtaccaaattcggcaaacaactcgcgcaacttctcatcggtgacggtatcatcaaggttcttaacatataaattcaacccatcaaatttgtttccaccatcacttgagccttgttcatatctccggctcaactcaagttccctctcagatttcttctgagctttacccacataccactccttatcatcaaacttctttccattgagagcttcaacagcacgagctgcatcttcaggattctcaaagttgacaaatccaaaacacctggatttcccatctccatccctcataactacagcgctcgagatactaccatactgaccaaaagtagtcttcaactcatcgtcagtagtcgcctccgaaagattcttcacataaacattagtaaacttcatcttatcagcagcagactctctttcctccttacgaagaaaaggtccaacaaaaatctgtttgtcattcaacactttcccattcagcttctcaatagcattcttagctgaatcctcagtgtcaaactgcacaaacccatatcctctagactgacccatgtgatcagtagcaaccttacaggacacaatagtcccacacccggaaaacgcctcgtgcagagttttgttgtcaactgacttatccaaattcttcacataaagaaagaatacataattaggcaatcaaacaaaaagagaagctgctagataagagacatcaaacaaagaatatacctttacaaacaaattcccaaccccacttctacgggcagaagagtcacgagaagagtaagtaatccgaatcatcttcccattgagataactgtagttcaacttctgcattgccttctccgctgacattacaaaaaacaacaatgataacaaaatccctaatcagtgtcaacattttaaattcgtgtaaattaatatctattaacaaaatcaaacaaaacccatcaatcaaactagccaaaggaatgattccaaaaccgaaaaatcagatctttaccaaaatatcaaatgttatcaatcaacaaaaaaaaggggaaatttttagggcacaaaccatcgtcggtgttgctgtagttgacataaccataaccaagagaagtattggtagcagcatcacgacaaacacgaacagatacaacctgacacacctcggtgaaatagtcataaagctgagaatcggtgacattgaaatccagatctccgacatagagagaacaaagagcaccgtgagtgactccgtctccaccgccgccgacgccgattccaggggtagcagaagccgtcgcagccccgtcgttaacaacagcaggaggaggaggagaatgtgaagaaggagcttgaacctgagccattttttttgctgggattgaagaaacgaaagctaaggctttttttttggttttttggttttaatgataaattaagagataaataaggttgacgacgacgatgatagatgaggaagacgaagtcggagattgttgtgggcagcacggcgagaccgcagcggatagtgattgagaaaagttgagattatatagttgctcaagtcttacacgacaagagtagtgaaatctgaaaaccctagtcccaggttaaaaggttaaaactttagtttttatttaacggttagagatagataagagaattagtctgctttattcttagccgtccgattcttttcaagatatctcacgtgatcctctcgtgacttttgagacctattccatgaatcatcgcatttttgctttgctccgccgctaccgtcgccggtttatgatgaattcatctccggtaagctcctgcacgaagttactgtgactgcttaagtttgaattcgagtatttttgtttctaatctctttttcgattatgtacaatgattacgagtgtgagagtaactatctaaaaatgtgttgaatttgatgataggtgatactatatctggtttggtttgtaaagtttgtaacttttcttgttatcgagaattctagttgttagagtagaaacccaaattctctgtctctgtttttcatttgatgataggtgaaactacatctgatttggtttgttaagtttgtaacttttctggttattgagtattgaaattgagcatttttagttctagaggtttaatgtggaaagttagtttaagctatggtgattgttatgtgcaagcaataaagtggagtagtagagtgttgatgagtgagttcatgatggttaggaaggagatgtttgcagttggtttaatgaatcttttacattgaagagaaggaatggtaagattgcttataagctggatcttgagggtgagtggtctcttctacgcattgggcttataagccatcttactagttcttcttttcaatgttgtctaaggacgctgcttttatcaggtgatcatttgttttcccccttttcaacatctctgagttgcatactttccctgtgataaattgcaattggaaattgctttgtatgcagttttattatactcaggttatacgttcctgcttgtgtcttttcaaagtcatatgacagcctcatgaggctatgaggatgtttcagattataactttgttggctttggtttccttgttttcaataatttgatgttagcctttgatctatgctgttggaaaacaagatttataaatggagttgaattcgttatgaaagtgtatgcattggtcattgtgaaatgaaaaccaaaagctgcttgacacacacctgaaatcttatggcacgtttttgcttttctcattggcagtggaagtttttgctgtgttaatacgaagtgaaagaactgagagctctctgcacctgttaatatttctaacagaatgcttttcttatactaatcgtcctatagtttgtcattggcattcactagtccagtttttactaaaataatcatcatattgtttgtcattggcttttaccaggttatcttttgtttcccttttcagcagctcagaattgcatgctttcatgtgataaaaggcgattgaaaattgctttgtatgcacttctatgctcaggttatacgttcctacttgtggcttttcgaacaatttatgtctctgttatatcattgactcatgaggcttatgaggatatttcagattatagctttgttagattttcttataatatttggcattggcattcacttgtccggttctcatgtgatggatatgtgatagcatggattgaaatcttgaagcttttggttatggttttcgttctaatctagttgactatcatgctagagttgtgactatatagcacaacaattcatctagtttctttattctgtaatgaatgtttctgttaaaagttttgttagtttgaggacaaatgattctacattcctcctatgttcacatcttgtgacggtcttgtgtcacttctatcgacttgagttaaggatgaaccattttcatgactttaaatccagtgcaaaatctactcaataagaacaatgtggacattgtgtagagatttgaagacaccaatctccagtagttcctaagaaagaaccaacctagaagacttgctaagctattgttataccctttttatggaccattgttagtttcttctatttcttcacctaattgtcgtaatggagcctagtaaacttaagaagcttctgagaacttaggggacgcggcaaggattacctttgtaagtgcacatctctctgtctttgtgcagaaccagaatcagcttctgcttttgttgatgggttaagttatcagattcttgggtatttgattctcatttaaccatacttttgattaacaaaccaataaataataatgtttttctcattctttggtttgtttatccaccaaagtactctcttttacggtacttcttgctttggttcaaccaaaatatctttatattccttgctgctgaatttgtcggtacaatgggcactagtaagctaaatattgttcagctaccatttgcataaatcttttactgtttcattttttctacaatgaaaaaagggtacatatgcactaaatagtttaactcttaccatttaaaaaaaaatagattgcaaaattgtaaataagttagattatttattgtataattcttttgaaaaatagtggaattttatgcttatgttaaaaatatcacttatgataacaagcggttttacatgatattacgttatttgtttaaagtttaaaccacacccaaaaatacactacttatttacggtttcaccattattgacgaattttggcggaaattttggttaagtattgaaaaggcggaggaaaacattattaggcttgactaatatgtatgataaatagcggaataactaaataattgttagcgaaacatattgaacaggaaaaagttttcgtaaaataattataaaacgcttaaaaactaattatagactttttgtgtttctagttataattttaacacaatagtggtataaaggaatatagcagaataatttttttttaaacgtaaaatattttgaattgtgaaaaaaaaaacagaatcatgttttcaaaacgtgaataagtagtataccatttatcccttttgtttcatcttttgattcaacgtcagagaatgagaaagaaagtaaatctcaacgtctaaggctcatcatgaggcatacgaaaatgtttggatttaagaaaatccaaacaccgaaatttcacattcagttaatacttttttcactcgtttttttttggtcagttgaacttgtgggggatcacacagaacatgtctgaagagaagttgttgtctagtgtccgaatcttttgtggtcacaagttttgcgttaatctttagactcacatatcacccgttatcttaacggttcctcacctttcacgttttggtattggccaatgtgtacagtaaacaaatatcagaatcaccgaagaatcttgccgaccaactctgccctaaaaccgaatgagcaaatgttattattttttgtccccacattataaaatcctcaaaaaagaaaaaaactatcaaatcacttttagtggttacgataatttttagagctttagttgttagaacaccaacctccacaaatgagtgttttcgtaactctacttttaaaattttaaacacatcaaaattattttcacgggttgagatatttttgcatcttcagctttctgataaagcagactcaattatattgtagactttgttcaatatttcaaactatctatacactctactgtaaccaacaaagagtcatagtgtatgcgttaagtcttttgtttaccgaaaacataaggattttggatgtcacgtcatgttggatttgcgttgggagaggtctagctgctctccaaatgacagttaaattacatgtaaatattctataaagatctcctagaacacaaaatgtagatttcacctctacgctacactcagttttcagattgacatttgtacttgaacaaagaaaggaaagtgaaacagtggaagtagtagtaaatcagaagtttcttaggcttttttttttcaagaatcaaaccatgtttgttcgttatcataaaacgttattaggacatatatttgaataacacgtcatgagtaggacttaatcgttattcgttaatacaaagatcatgcaaatctagtttgtaacaagtgaaaaatttgagaattgtgttttaaaatctttgattatcgacgacgaaaacaaaacccaaaaacaatggaggcgcatgtttaacactaaaatcgaaagcgcatgttagcggcaacagcgcatcttaaagacaaacattctcgtctctccttctacaactactttttattttttctatcttcttttcacacattcgtcatcatcaccatccgaattttccgggtcgggtaatttattcaaatcgacccgttccaatgacccgttaccgctcttacgacaattctcaatcttctcgtaatcaccgcgattctcgccgccggtattcacaaccaccgtcgctccaagcgcatcaacctgagcaccaacctccgccgcttttctcctaatatacgccgccgataaatcaccacctcttcctccgccgttagaaacagtaagtccagccaaaagctccggaaaattaagcctcgctgaaggaccacggaggtaaaaaacagcagtgtcgtaagctctcgccgccgcttcaggcgtcgcataagaacctaaccagatccttgatctcttattcggttcccgtatctccgccacccatttcccccatttcctcattcgtattcctttatacggtttcagatctctcttcctcgtcccaatccccatcgtcgccgccgtaaccgtcgctgtcaccgccgcttccgtctccataaccgccggtaaaaaaattacaaaaccataaatttcgatctgggtttatgaacggagggagagattttgaaaatttgacggcgagacggttacataataaggagggacggaggagttttaaagagacgacgaaagaagacaaagattgagaattcaccgacactttttattttaatatttgtaagacacggacagacaaacaatctcctccctccttccactcctatatatatatccaaaatatatattttgtattaaacataatgtactgtttacaaatgatttatgttttatttaatattgtttgatatggttttttgtaatcattatatacataaatagatatatgactattctcttaaacaatttgtaatcaggaataatttgtaatttgacgatcaacatcttatatataacagttttgtaatttataataaataataaattgggatgttaaaaaactaggatattaagtgtgtatatttcttagtatatcatttaatagataaataacattttttgtttttatgagtttttcttatacatgaatgtggttattttaaagatgtttttgcttgtgaaaaaaaaaccaaaaaattcttctaaatgattactttttttgctggtttacaaataaattaatttaagtcaaatgtaactcacaatgccgcaatataatataacgtcattattgttatttttattaaatcatgataaattatatatcaaattgaatcttgatgagaagtttaaatatacttttaaaacttcaagatctagtatatgtaactgtgaattctctttgaaaatatttgtaaaaattttattgatggttaaaattttgattttgtaggtttgatctatatttttttgcaagttatggtaaatttggaaaacatgttaattgaatgggttttattttgcggaaacccttaggaatttatttggaagaatagttaaaaaaaaaaaaaaaaaatcaatatgtccaataaataacacttcaaataaaaattaggtcggtggacaatctatgatgtttgcaaatagaccatcacgtaaattgactattatagccctgtcttaatttgtttcaaagttcatccagagtgtttaatggtaaaagaaagtatcaaggatgtagacagaaagaaaaacattaagaaagtacaaaaaaacataaaaattgtggtcactccgaaattaaatttggaattgatttgctaagaaaagaaaatgaaacctaatctcaggacctatcttctcacgtatttggtggttgattagttgtagaagtttaatgtggattgttgttgtaaatattttgaatgaaatgtttttgttgttaactatacttgggatgtagtccgggagtctatgggctagtggtaaagagacgggtatgtgacgttaacacgttctaaattcgattcacctgatgtacgaaaactccaacacattttcttggatatgaactcatacttacagcccatttgcatatctgaagaaatggtctattcatgagctgcatccccagagatttgtgagaaatgatatgataaaaaaaaaaaaatcaamagtttagcaccgcaaacaaatccatctttaataagatgaatataatatctttctaattggtatattttctactatcatgaaagattttttggtatattatctactaaagccataattgtcatattaactttatagatcgagacatacaatacctaacactataaatgaaaatattacattcaaactaaaattttatttaacatattaattgagcttaactatacaaccacatacaaattttctacttgtcaattgttcatctaaacatacaaattttcttttatatgtaataaacgcataactatcaaatatatatagatagataactcaatataaccacaacaaacaaatgcaatcctttaaaaaaaatgcaatgaaaataagtggtttctttgtgttggggcttaaaaaaaaaaatgcattacaaagttttaggatcacaaagtctttggagagtggttaacaactttgttgttggtgaaaacctaatttgaatacttcttggcgtcatgaggtctaaaaatcactctatatatatgatttgtttatgtccttatatttttgtaattttaatttcttgttatcttttcgtatcattaggtctaatggtccacaaggaccacaaccatcttttaacttccacttacgagagttcgaagccaattttaagtcggtagtcggaagtgacatatgaggcaatgatggctctaagccaatcaaactatatcaataaaaagactatatagctgatcatattaatgattttttagaagttagcaatcgtgcatgtcgaattgtccgtgaatacataatgtgaccgacatttagtatgatttatttttttctgaaagaaaaagaaaaaaaagatcgtatgatttggatttacatggctggtaaagtcacatgtaaacagagcatcttctatcatgttattgaacattcgaatataatcccatccgaatatcaaaatttaaaaatatatctaatttatgtggcaaaatcttgatacatcatcaaagcttctaaaatgtttttaagaaattggtaacgaataatagcagagtaaaaagtgatatcatatgtttcgaggcttatgtttttcaaccccaaattttacttactataattaaatatatgtttttagcaaatatagatgatcaaaagttacaaaaactaatgagctaaaccccaaattaaaaataagaattttatccaaaatataagaaatggagacaacgaaagcttaggagggggtttgactttggtaatccagcttttgtctgtacttatgcaacctaatcggtattataatcatagtgatttattatttgtacaatagattagggtccatattttatcattaactttatacaatcatttttacttttgtcgtttatacgatatattcaataacttaactttgccactaattcaacgtcacaggtatgacatgtactttcatctttgttatataaatgacaaaagcgaagttcttttgtctttttttctttgtaggattgccaaacaatcatatatgcaattatttgtacatattgttttccaattaatatataattctctaatcttattaagttagctttgttttatcaattataatatgtttcttattgtaattttcttcttaatttaatcggcattacaatttgtctcaaatcaagtccaattttatgtaatgattgatctaaagaagcatgtatttgattataggtttataatttaaaaccaattagcaataagtggattgatccatatcttttatataccatttaaaattatgttttatatactcattcgatctgtgttcaatatgtcaagaagatcgttcttgatcaattatattcatccttcaacttaaaagagtattttcaagttagcatttatatattctctctttctatttttctctttctgtaaattagtaattttctactatgaggttacaagttaatatgattagtaatgtagtaaatcatatattacaaagtatacttagcaataatattattttcattatactattttcaaaaagataattgtaattatatcattgaaattttaacgacacacgcataatgtgcgttagatatcaaatttgtataaataattaatcgtgtgtctgattttttttaactttggtggactagctagctgtgaactagttggcacatgaacatggtgccaattacgacaattcatacattttttttggaagaataaagcaaaacagcaaaccatataaatcaataagagaccaccaatatggtttacattgttgatattcacatcctttgtatgaaaccattatattttcatgtgcactcgtggttctataaattagaattatacctatttagaaagtttcaaggacagtcgttggttttaaatatatataaaaaatcttcatttatgaatattgagtcatggaatttatgaggtgatgtgaattgtttatcttttagttttatttttattattctgaaaagtcatttccaagtgtgaacggagcatcaatttttttgataacgttttgcgatgaaaaaaactatatttcttctttttttttttaaatgaaatgagctcaaaatagatttatcgcatggaatttttttaatttttaagtcatatgaaatatataatttaagtttgatagatcaagaaatgggtccatcagagaatcaaagctccactcggatcagaccgattcaaacgtatggttctaattagttgtttttataaaactccttgaaggtaaatcatatagatatataaaaagtattagttcatatgagaaaaagtgaaccaaaaaaaaaaattgtataccctaggttataataggtagaggagtttgtaaacaccaatcaactaaactaacccaaagtcaaaatgaaactaacgcaaagtcaaaatgataattataagtacttcacttattgtctgataatataaatgcgcctgtcgcaatttaaatggtgaagtctacgacattcacaggttatcccctattaggttatatcatattcattaataatttaatatcccaagttcccaaccttcacaaatggatcttcttggtcataagattaataattctagatcaaatctaatgttaaatatagaattctacgatgtgttgcaaacttcgagtgtaacttttttcagaaatctcaacatattgttgatttgattgactatatccagatagaggataagtattcaaagaaaaaacgtaatatctccttttcaagctttattttatactagttgacttagacttagaaaactagcatagtcaacaaacgttttgtcataaatcggatagacaacattaatgtaaaaagacttggtaaacaggtaaataaagacgtcttaaatgtacatataacctgtcgtttctttttggggaggttttaaatgatacatagttatactgaaacggaagataaatatgattcatcgattaatctgtcatatctaaaatattgtaactattgacttacatagatatagagagacaactccaattacagtattccattcgttcaagccttgcagaaatggaactattataagatgatggttaaattagtgggccttttaataagctcatcttatctctgataacccatgacttatgacctttaacctacaagaccaaaacttgtcagaccaaaaaaaacaaaaagcccaaaacttgtaagatgctaaaagtatattactttgggccaaaccagctatttgaggccggattagcttttgtaggtttcgaaaatgtagtctttataaagagctaatcaacatccggacacaattaatcaaaacttcgtactgattcgtatatgttgggatgcagagtctggactcctggactcaggtgcttgtttattttgggccgaaccagctattcgaggccggatatggagttcacgtttcaaacattgtttaactattattgttcgggtgagaattatgagttgttaaggacggttgatcttgtttaatttcaggtgctcgagataactggagaggttagtattagagtagatacgatatatgtaaatcctagatttactagatacgttcttatcttctatgagcaactctccttgtataaatactctcttcgactattggaataaacacacttttacattatatttcattgtatcagagcaaaagctcttttgacctaaatttttttccaccgcagccttcgttgttctgtttcttattctacttctattttctcctattactatacctctactatacgatgtcttcagcatctgccttggtaacgagtacgtcttcatctaacacgtcctccaccactgcatatcttatcaacgcatcagacaacccgggtgctttgatctcttctgttgttttaaaagaaaacaactatgctgaatggtctgaagaactacaaaactttcttagagccaaacaaaaacttggcttcatcgatggatccatccccaaaccggcagctgatcctgaattaagtttgtggatcgccataaattctatgattgttggatggatccgcacatctatcgatccaacaattcgttctacagttggttttgtttcagaggcatcacaactgtgggaaaatcttcgtcgtcgtttttcggttgggaacggtgttcgtaagacactgttaaaagatgaaattgctgcttgtactcaagatggacaaccagttcttgcatactatgggcgtttgattaaactatgggaagaattacaaaactacaagtctggacgcgagtgtaagtgtgaagctgccagtgatatcgagaaagaacgtgaagacgatcgagttcacaagtttcttctcggtttagacagtcgtttcagctccatccgatcttctattactgatatagaacctctacccgatctctatcaagtgtactctcgcgtggttcgtgaagaacagaatctcaacgcttctcgtactaaagacgttgtcaaaacagaggcgattgggttctcagttcaatctagtactacacctcgttttcgtgataagtctactctattttgtacacattgcaatcgcaaaggtcatgaggtcactcaatgctttctggttcatggatatcctgactggtggttagagcaaaatccccaagaaaaccagccttctactcgtggtcgcggctccaatggtcgtggaagcagctccggtcgtggaggtaatcgttcttctgctcccactactcgaggtcgtggtcgtgctaacaacgctcaagcagccgctcccaccgtctccggcgatggcaatgatcaaatagctcagctcatctctctccttcaagctcaacgtcccagcagctcctctgaacgtttgtcgggtaacacttgtcttactgatggggttattgatactggtgcttcccatcatatgacaggggattgttcgattttggttgatgtttttgatatcactccttctccggttaccaaacccgatggcaaagcctcgcaggctacgaaatgtggcacacttctcttgcatgactcttataaacttcacgatgtgttgtttgttcccgattttgattgcactttgatctctgtctctaaattacttaaacagacaagctcaattgcaatctttactgacacattttgtttcttacaggaccgttttttgaggactttgattggggcgggggaagaacgtgagggagtgtattattttaccggtgtattggcacctcgtgtacacaaagcttcgtcggattttgcgatctctggagatttgtggcatcgccgcctaggacatccttctactagtgttttgctttcgttaccggaatgtaatcgttcttcacaaggttttgacaagattgacagttgtgatacttgttttcgttcaaaacaaactcgtgaggtttttcctattagcaataataaaacaatggaatgtttttctctaattcatggtgatgtatggggtccatatcgaactccatctacaacgggtgctgtttactttctcacattagttgatgactattctcgttccgtttggacgtatctcatgtcttctaaaactgaagtctcgcagctcattaagaatttttgtgctatgtctgaacgtcaattcggaaaacaagtcaaagcatttcgtactgacaatggaaccgaattcatgtgtttaacaccctactttcaaacacacggcatacttcatcaaacatcatgtgttgacactccgcaacaaaatggtcgtgtcgaaaggaaacatcgacatatcctgaacgttgctcgggcgtgtctatttcaaggtaaccttccggtcaaattttggggtgaaagtattcttactgctactcatcttatcaatcgcacaccatccgctgtgttaaaaggaaaaactccatatgaactcctctttggcgaaagaccctcatatgatatgcttcgctctttcggttgtttatgctatgctcacattcgcccgcgaaacaaggataaatttacttctagaagtcgcaagtgtgtctttataggctatccccatggcaagaaggcatggcgtgtttacgatctggaaaccggaaaaatatttgcaagtagggatgttcgatttcatgaggatatctatccatatgcgactgctactcaatccaatgttcctctaccccctcctactcctccaatggtgaatgatgactggttcttacctatctccacccaagttgattccactaatgttgactcttcatcctcatcttctcctgcgcaatctggatcgatcgatcagccacctagatcgatcgatcaatcaccttctacgtcgacgaatccagtcccagaggaaattggatcgatcgttccctcatcttctccttctagatcgatcgatcgatccacatctgacttgtcagcttcagatacgactgaattactaagtacaggcgaatcttctactccttcatctccgggtcttcctgagttattgggcaaaggttgtagagaaaagaagaagtctgttcttcttaaagattttgtcacaaacactacatcgaagaagaaaacagcatctcataatatacactctccctcacaagttctaccctctggtctccccacttctctgtccgccgattcggtctctggtaagactctttatcctctctcagattttctgactaactctggttattctgcaaatcatattgcttttatggcagcaatccttgatagcaatgaacctaagcattttaaagatgctattttaattaaagagtggtgtgaagcaatgtctaaggagatagacgcactcgaagctaatcacacatgggatattacagatttacctcatgggaaaaaggctatcagtagtaagtgggtttacaagttgaaatacaattcagatggaacacttgaacgtcacaaagctcgccttgttgttatgggtaatcatcaaaaagaaggagtagacttcaaagaaacgtttgctcctgtggctaaattgactacagttagaaccattttggctgtcgctgctgcaaaagattgggaggtccaccagatggatgttcataatgcatttttacatggcgatcttgaggaagaagtttacatgcgactacctccaggtttcaaatgttccgacccttctaaagtgtgtcgccttcgcaagtccttgtatggtctcaaacaggctccccgttgttggttttctaagttgtcgaccgcacttcgtaacattggtttcactcagagttatgaagactactccctattttctctgaaaaatggcgacacgattattcatgtcctagtctatgttgacgacctcattgttgctggtaataatcttgatgccattgatcgattcaaatcacagcttcacaaatgttttcacatgaaagatctcggtaagcttaagtactttctcggtcttgaagtgtctcgtggtccggatggattttgtctctctcaacgcaaatacgcattggatatcgtcaaagaaactggtctgctaggttgtaagccttccgctgttcctattgctcttaaccacaaacttgcttccataaccggaccggtgtttactaatcccgaacaatatcgtcgcttagttggtcggtttatctaccttacyatcacgagacctgatcttagctatgcggttcacattctttctcagtttatgcaagctccgttggttgctcattgggaggctgcgctccgtctcgttcgttatctcaaaggctcaccggcgcaaggcatttttctccgatcagatagttctcttatcatcaatgcttattgtgactctgattataacgcttgccctctcacacgaagatctctctcggcatatgtcgtttacttgggggactctcctatttcttggaagacaaagaaacaagacacagtctcctactcttcggctgaggccgagtatagggcaatggcatatacgcttaaagaactgaaatggttgaaagctctactcaaggatttgggtgttcatcacagctctcctatgaagttgcactgtgatagcgaggctgccattcatattgcggcaaatcctgtgtttcatgagcgcactaaacacatcgaatcggattgtcataaggttcgtgacgctgttctcgacaaactcatcactactgaacacatttatactgaagaccaggtcgccgatcttcttaccaagtcgctaccaagaccgacctttgaaagactcttgtccacgttaggtgttacggattacgtaccatcaacgtgagggggggtattagagtagatacgatatatgtaaatcctagatttactagatacgttcttatcttctatgagcaactctccttgtataaatactctcttcgactattggaataaacacacttttacattatatttcagttagtatataattagtaacctagtaaatttttatagttttatacataagtattttacacttcttaaaagataatctaagatataaaaaacctaatataagaggttcatcgaataagacaccacacattattctccataaccaactatcgttcttactgtggtacatgtttatttacatcacaatgatcgccttctggcgacgttaaaaactaagttcaaaatgcggataatcaaacttatgtacaaacatgtatatatatatatatatatattcaacgtatgtcttatttatcaaattcaaaattaattttaaatctgatagtgcatgtccgtataaattatagaaaaaaaaacacaatcatagctattctgatatcaatttatttattctttatcaaaatttgacatgcagttcttttctgatatccaatatccactcataaatcaactatactatctgtgtctggatccattcttaagtttgtcaagtgaatttgagtatgacaaagccaaagtacgtacttaattaaaataaaagttaattttatatataagaattataaatttacaacttagaagacacgaagggttagattagaaataatgacctaatggaaagactaaagtggaacaaaaagacacgtaagtgtctcaatggtccaaatccaatttgtttcgtccttcacaagactacaaacctatgcacatgttcgaacatatgaacacgacaacttctcttctgccactttgttattttcttttttttcaataaaaaaatcattatcgatggaaaatctaatacacggcatcaagatttctcctaggatttgaagaaattgtacgcgtaacctagaataaactatacggtgctctaagtcaagattttcaaaagattatcaacatttcatcaacaacaaatactttttttttcttaatttattcaatatttcctaaaagaatttcttagcttgtagtcttgtaataagttatactaaagtgaaagaggagatgatatttttaggaaattgttatagtaagtcaacccaagttatttttgttattgtgttgtttatgtctttttggtatctagtaggatgtttaatgactacgtaaacttttccgaaattataattaagaaagaaaaaaaaagttgaaaaagaagaccacttatggtcaaatacaacaatggtcaaacacgacaactttggtccccaaatctctttctaatcctttgaccattttcacatgtcccatctcttttaccttacttttcaactccacccccaaacttttctcttctttattaaatgacatcaaataactaaaaatgaaaaataaacccttcaaattgcaagtaacaagtaaacatgatgaatatatcacaatttataatttaacaatccaaaaaactaacaaatcgaaatttagcaaaagctttttgattttgattacattgatttcattcatagtttgagtacttcactaagtaaggatctaaatttatattataaaagccttaaataaagatttgttcttttcaagacgattccaaaataagatcagcaacggcggctccggcgagatcagcggcggagagagaatgattatgatctccttcataagtaacaatcaacatggacgaatcatcagctgctctctcaacatgtttacgtgctggacaacctcttacgctactacacttataatatcctctgttttcacaatatcaagaaacagagcacaatcaatttcaccataaagtttcgatttttattaagatactgtaattgaaaattgtactttttatagtttaccttggatgtggagatcctttaattggtttttgtccgtatttcctccatgaataatcgtccggtggtacatcggacatttttgcacttatcgccggaaccctaattattctcctctgttttatctttctgaaaaaacagagcaaacaaaagaaacaatttttagataccaaatctatgaacttttatagttgggtcgaatctaaataccaaatctaataaaaatttaccttttcttcgagcaatgacaacgaccggaggaagaagcggaagcgcattttccggtgagaagattctcagagttacattttctctttgttgattttgagaaagacgagaccgtcgtggagaggctttgagtttgagacgcaaacggcgccgtttcagagggacgttgatgatgatgaatcttcttctggttgtctgattccgttgttacagaggagagagatgagaaatcaatcgttttcatcgatgaagaaaacgaaccttttcggatcatttgcggcggaggaggaagaggagactgaaacggcgtcgtttttggttcttcttgtaaaagaaccggagaaataacatgaaccggagcacgtctaaaccgggcgtgtccggttcgagttcgatctaagagagatatgactcttttaaactttgaaacagccgcgtccgccgttgtgttacgagctgattcaagatctgcggcggcggaggcggaggcggaggcggaagaagaagatggctgatcagagttaaagctatcacgagacattaaaccgatgaaattttcgatacttttgagtcctgaagcagctgcttcttgaacggcgaagctatcagctccgacgccggagatgtaattccgagtcatgagctccaccgccataaaatctctctctctacaaggagagagttgtggactttatgggattcgagaggactaaagtaaataagagaacaaaaatgaataaaaaatttggtatttaaagtgatgtaatttgtatggtaggtgactgactaatgtgtcacggtttagacttttcctatgttcataaatagtcttttttactattcaatttttgttgttaagagtcaactttttctttttttgttagattcgaaaagtcaaagtttgtacaaaattagaggattcaaccttcacgtgtttgttgcaacggtagtgataagtcttgatcatcactatttttaaaacgtttacgagcatatttgcatacatgttctttacttaaaaaccaagagaactcaatacattttattttattttactatacaccactatcccatgagctttggcaaactctaatcttttgtcgagatagaagaatcaagtctttattagatgagttgttgtaacaatttgtaacaccaacaatttttgatacaattcatttaagcaccaaaacatttgtaatgcctacaattcaatgtttttgaaagagctttggaaaaaaactttgtgagagaacttacaaactcacatcttgttttcttacaactatagtgattaaagctgtccaaaactccttattaaactgctagtcatccgtttagacacagttaaacacttttgtacatatttttactctgattaaccaattatacatttcatcgaaaaaactttatttttttcaaaaaagtttttagaacaaatgaagtattactacttcgtatataatctagtaatttgtattaggatgaaattatctctattctggtttaattagtacattagactcattttttactccactaaagaaagagatgtccaaactattaggctagaagatgaacaaacggctaaaccactaacttaatcgcttttcgacattattctaatttttcttgttctagtatttttttttttgtcggcatttttcttgttcttttcgtcgacactattgtaattaaacttgataaaatacatgttgttaagatgaatgaaaaagaaaatgttttattttttatttttatggagagacaaatcaagataggtgtgatgataagagtcataacggacgaaaaagaagagagaggatcgagtcaaactttcgtcgtcagccgtatgatctggtttcgaagtaggacccaacaaatttaacttaaatcgcagaagtttttgtcgtcgccagcttagtggagttgacttttcgtcaacatcctctttgttatttttgttcattaattctttgggctttatttactctacttttattgcttcttcttcactaatcatggtttaggttggttgttgtacaaccatatttgttaaaaatgaagtctaatacaatatctatgccgatatcattttagagtaatttcttgttacaaattaagtttaaatcataatgtcggcgatctgcctcctccgcctctccgtttgcggcactccttgccggcgaacggggagggctcctcctcctccctctttgttgtctttgatgtttctcctcctctcgtgctccatcgttttgtttcagatttcgattgcccatcgtctctagttggtggtgcgtggtgggtttctcctttctgcggtggttgtggctcttgatgagacgtttgggttcgttggacctcctagcgacgggattcttctccgatctagaaatcaggtggtgcatcgccttagttttgttttttctgctcttcgtaaagcctcctcgattcttcatcgtttttgctcgaagttggagcttgtggtgtcttttgttgttgttgttttgtacttagacaacagtgatgttatgcgtcatgtcggagtggagtcttaagggaagaatagaggcggcgcgttggtcttcgaggcatcatttatccgtgggagatggttcctattgttttgataggaatggtgactgaaggtagtttctttggttatccctgtaaccgtcggatttgtgttttagtcctctgttgtctttgcgtttttgcgttagtttgcggagaagctgtaggcgctttattaagaggttttgtggacgggcttctgctaaagtttgctcgtggcaactacgatgggactccaactctttggtatcttcgagttgtggaaatcacgcaaatttctgagtttagcttctcggaatcggtgttttttctcttgtttccgcttttagttaacgttaaccactattactgtttgtttttgtctgtgctttctgtagatttatttttccgctacatgtattccgtgtaacttctgtcataacttcgaaaatggtataaatacttaacattgataccaaaaaaaaaaaagttaaaaccataatcagtactcatgtgatcatctttttctacattttattttttgtgtgaaaaattatccaagagagtgttattgtagattagaccttcaacatgattgaaacaatgcatatatgtttggccaatggtccacaataaccataacaaataacaaacactgatacgatgatatataacaaaaatagcatggtgacatggtctatacgtaaaataatatacacaaatgaaatcataaactagttcaattttgtttttaattaaaaagaaaagttagtgtagaagcttggaaaaaagaacctttattagggtaaaaatattcaacctttagttaaccagatcacgacgagacattcacacagttagattcgtagatgtgaccacgattttaatttaatcgaggagagagacttgagaatgaaaaacaaagtacacacaaaacttgacttgactgaagagacactcaaagtcaaagacgaaagctgacgaaaccatttattcctcccagaaacgtgtttcttttgccctatcaccgaaagttccttcgctatatatatcatttcctcttcatctatattttgatcatagattattcttaaacatagttttagttcatgattttaatgaaacagttgtattccgtcaccaaaatcgtgttttaaaatgtattcagattcctataaataaatttaagaagaaaacgaatgaggatgggtagctttcaggctttgagtgagatatacctagggagaggcatttagtgtgcgcattattttgaacgcatttaaagttcccattttcaaaccttttgataaaaacagatttctaaaagatgagatctaaattcgacaaagaaatggagaaatgattagatccatatgcgtgtgtatttgtaagtcattcatttgggtgtattcaagtgtgtgattattattattgtttgggaatatttgaaaaatatacagacatgtgtttttttctcaattttattctaaataattgtttcagtcacagcaaatgttatagacaataaaaaatagtcaaaaataatttattacactcactcacactatacttattatgttgtttaccattcaatttttatgtcaattgttttttacataattagttaacaccgtattctattccttttgtacctaccatatttgttatattttatttgatttctctacttatgtatttttaagtatgttcgtaaaatcactataaaatatctctttcggttatgctaatttaagataaactaatatatatatttagttttaacaataaactcatgagttatcctttcagtttcttgctaaaactacatcttccttcggtttctacaacaatttattacttttttttttttaaatctcttttagatcattgcttaaactaaaaatataatatattttcttttctttggagttaaatatgtaaaatatctaaaataaatgttactttatcttttttactaagaattaaaaagtaaaaaacaatatatatataaataataatatatatgtaacaaatatttttcttttggttatgtggttttaacattttaggatgcttttctatttaaatatttttaatttgttatttgaaattttttgttggttttctaattataatttcggatttttttgtatatttatttataggatccatatattgatataatctataaccaatagattttatagttttgggtttgaatatgtaaattaaacccatataaataaataggttgaatcaaacctgtttaataaaacctcgaacccatatgggtttggatcgaattaaattatctattttgatacccctggctcacaaatgtttcatgaagtatcatatccaaataattatgtgatcccgaaatatatgtggataactactgattgaaaactcggcccaaaatacatgagcaagcaagaaaactagcttagtggacacaactcaatagcctataattttgacccaacactctcttttctttttttttatcaacatatattctgcgaatcaaatgagcttccataaactccaattcttactttgaagggcattcataataaactaagaattccctactacttctgagtgaaggtgcagagacgtcactcgtcccaatcatatttgaggatgcggaataaagatggaaagtataacatcacgtttgaggttaaagccttcagaattttccttaatatgacttttcatttatcatctgattttgtaatatatatgtttaagattgcttaaactgatgcattgaataaggtcctggttttgaaatacatgaatgatttgttttttcatacctccttaacaaatggaccattatctaatgacgtaagctatatctcctcatagaggacaactctagttatcaattagaacatctgttccttgacattcaatttccaaggaatccacaagaatgactttgtcattccgtccattaatcaggtagatatttttgaccacatctaaatgtggatgactttgtatttcgatatggtcaaaaatatttacctaatttaacgaccgaaaaacgaagtcatcgttatggattctttgtagactgaaactcagggaacaaaatctcctcttccaaaacctctggaacatttggcatcgtcgtcatatgtttttttttttcttttcttcttggtgtattgtcaattgtgaatggccgcaacagggttttatagtatttattaaataggcaaatatggttagttatgatttaagaatattctcaccgatttcatgttaaatgtttaaagaaaaaggaaattattgatagactaggatatctacttggtcaattccgtatctgtgtattttagagtatcctaatttattgttacaaattcaaaatcagacttgcagtgattgctattgggccgttaaaatgaccaaaactggattacttatttttactcaaaatcagagtacgacgattgcggaaagcaaaatgacaatatcatcaaatcttggttgccatttcttgttttccgggtttatgaaatcacacctttgtagagagactagatagattatgaacttcacatatgaaactttaccaaccattaaggaaactgaagtaaacagtttcctacttgacatattatctcaaatctcaatcgtcatatgttgtgaatgactatatactttgctaactatggtagttgttcgtgagatttggagttgtatagtaccattcatttttaatgaaacattgtatctatcaaaactaacacttgaaagaaaaaaaacacattatagaatcaggaagaactcagtgaacattcatgaataccaagcatatcgcaatttccatgttcttaaataactaggacacaatccatgaacatcgatagaaccggacagtgattactgattagtctttagttttccaccatgatgattacaaaagggtcaagtatgaaacattattttctcactgaaaaaaggatgtaaaaaaataagattgtacattgagttcaggtgaaaccagtaaaatagtcaggatgataaaagagcaaaatatgtctatctctacttcatccctaacaaagatataggccatcaaaagagaacaaaagaccgaccttttcaaatgctacttctctcaaaagactgtaaaattgctgacctgaacagttttgattgatcattcactgctctctgttggagccggtttctttccatactgctgcaagggaaaaacaaaccgaggatgaagttagaaaacttactcaacttgttcagacgttagagtcagttctgtgaaggaaggaaagaaaaagaaacacacacctttttcccaaaagagaaagggacatatctgtatttgatcatatgctgtatctgtttcctcatcgtaaggaaaaacaacatcacccagtagaagagaagtattggccagaatacaggtacatcaaacacctcgaagaacgtcatcataaatccgatgatgaaagcccttatgatcgataaccttcatggcaaaaaacacacacacaacattccacatcaaaaaatccaaaggacatcaaatcgagacttcatcacattctagattgataaacctaaaaagaattcatacaaaggcttcacaaagtgaatcttgtcgatctcttctaaatttggttctaaatcttgctaaaaatgtagtttctctgcagaattgaatcaatctagctacatcaaagtccacaataattgaattcctcaacaagtaagtcatcaaacatcattatcaatcatctgatctaacgattcagtcatgaattcatctgcaatcaaaccaataacgctactaaaaccctagatcagatctacgtaatctaactatatcaaagtctacaatagttgaattccttaacaagtaagtcatcaagcttcgtcatcctctcaagtctcaatcgataaagtgaatcaaaccaataacgctatgctcaatttcactactaaaaccctatatcagatctaacaaaatcaataatacagaatcaaagagacgaaccagaatttgaactcagggagacggcgaacgaaaggacgatactcatcggatctccgagtaggaagagaaccaccggaagtgagagaagcttcgggatcttcttgaggagatagaaaagcaatgatgagattcaaaaggtagatgccgatggcgtaagtgatgatgtagaagccttccacaaagtaaacacgaacgatgtagatcaatacaacacagagacatgcgatccatcgatagagaacgtgaggaaccgttttgtcgagaagatgttgttgtcgctgcgaaaaggcgtggatcaatcggttaacggcgtcggcgggagatgatgagtcgcttgattggagattatcatcggtggcggtggcggtggtggcggcggctgccggaggtacaacagccgttgctgcggattccatcggtggatactctctctgtgtctctttggtttgatctctctctctacctcggaaaatgcgacggaggagacggagattcgtagatttggatttgggactttttgggagatcagatcagatcatatccggtttacggaagatctactatttactatccgaaccggttgaaattatacgatcaatctatcggtttacttgcgggtttagtggttcagaaattattaaacgatttatatgattggtctactggttgaaaatatagtataacacattaacttatgtttgaagatttaagtatatgggagccaactccaagtctccaacacaaaccgaacttacactaaattaaacaaaaaacgattacaaaccaagctaacctagtggtagtatcctaaagaatcatatataaaaactcaagtggacaaacaacaagaaagaacaatttgcatcatgtgtatatactttggccatagagaaacgcttagagactagagttagtgtaagatcaaacgttaatagtgtccgtaatggtacgatggactcttagccgatgagctaataggatatctttcaaacactactaacgcctctttcatggtcggtctcttttgtggaatttgagatgcacaactatatcccaatttgaaaaggccaagtaaaaagtcctctttgccttccaattcggagcggatcgctacatcagccattattagcgcccggttcccgtcctctacggtcagcccatttcctacccccacctcgtctatcgacactatttttcccgtgagcagctcgaggaggatcactccaaacccaaacacatcccatttcgggtttggtttgagattgcggagcgactcgggtgcgcaatagggagatatgggcccaacggagcttggacttgggctcggtgtgggcccgatggtaccaaattcacgcgaggatgctgtcaatcgcttgctactgaaaatccgagatgatccactagctcggttatagctagtatccccggcgagaagcctttcgagcccgaaatctccgatcttgggctccatatcttggcccaagagtatgttactaggcttcaagttaccgtgcacatgtttcttgtcgtggaggtaagcaagcccacgagccaaaccttttactatcttgagccgagtctcccacggtaaatggcacggcgaagaccctcctttccctgtccaatagcacaaagaatcaaaatttgaccagccgttgactttattaatacaggtgtaatttaactactaccaactaatatgaacacagtagcaaaaccctggtgatgctagcgtgcgacttgatcttatgctaacatgtgcctttatcataaagcgaggaaaaagattgaaatgtgaaagagatgattttgactcactgtaacgggcgttgacgagactgccgttaggaacaaaatcgtaaatgaccaatttctcgtcggtgccccaatagaatccacgaagacgtaccaaattcgggtgaaccaatttaccaatagctcgaatatgtgcctcaaagtctttaaaccggcgttgttgactcaaaccattctcacctaaccgacgaaccgcgagaaccgtaccgtcctcaagaacagtcttgtacattatactcgaaccagtggctcctaaaatgtaagcagaagccttaagcaaagtttcaacttcaagctctttctctcctccatcaatggttactaaagtccctttcttattctctccaatctctcctgaccgttgattttcttcgtcttcttcttcggtttcatcggtttcttgattcttacggagacatgaccattttgcaaatctgcttgattgttctggagatgaagaagatgtagttgttgatgatgatggtgataacgaagttgtgtctttagcttcatgagcttctaggctatgattgttcttcttctccactgtcttgttgtttttgtatttataaacgtagaagaagataagagcgaggattccgattccggcgatatctccgactatgattccgattataactcctggtcttaacccggttcgaggatttgagttgttgttcggttcggtttctcgattagacccgattgatttaggtatagctgcgagtgcaggtgtagaggttggtggcgagacggtggccggagatgaaggaatgggacacgggtttcgggtcggacctccgcataaacccgggtttccggaaaacgaaattgatttctggttaaggtaaaccggagaatctgggattgaaccggttaaattgttgaaggagaaatcaacggtggcgttttgaggaaaaccggcaccaacattcggaggaatctctccggagatttggttatacgagacattcaggtatcggagattgtcgccggagaaatcaggtgggagtgaaccgttgattagatttgaagaaatgtctagatactgaaccgatctccatccgccgccgggaaactcgccggagaagtagttgttcttcagagaaacctccgttaagcttccaagagacgctaagttagctggtagtttcccggtgaagatgttatcggagagatttaacgtctggaggttgtgtaaacctccgattgatacagggatctcgccggagatcaagttatttgataaatcaagaaaccggagcttatcggcggcgaaaaactcaaccggtaatgacccattgagtgaattattggaaagattaagactttggaggttttggaggaaacccagatcggaaggaatcgaaccaacgaggttagagtttgggagagataaagtaacaactcttgaatcgttattacacaacacacctcgccatgaacaaggattgtcgtggtcgtagttccatgattgtaataaagagagaggatcaagaagaacagagtatttgaaactcagtaagagaactccatcagagtttaaagcagaggagagaagaaacagagaagagaagaagaagaagaagaagaagaaggagacgaagaagaacggtgaagctgattgtgttttcatggcttccaaggaagaaaccgcatcaccagagagagagagagagggtcaagaggtagaagaagagagagttaaagaggaaacagctcacgcaacgcaaaaccaaacctctctgtttcctgctctctgcaaaatctgcagttttataaatactataatcaatgcattttgtttttcttttcgattaaagtaatcaatgcatttttgcacttccagtttccaggtttcattaatcattgaatataacagatttattatatatatatggacatatacttagactactatactttgtagtttgtaccaatatcaacgtcactcggattcgcatccatgtactgattacaagctcaataaaatacaaaaatatatactatcgtatttatgatatattggtttaacaaaactaacattctttatatattttatcaaaaaaatcatttttttttaatattagagctgattcaatgaaaatggtggttcgaaacttcgaatcatcaatgtattgtgtggtggtattttttgtatttactatacaaaatatcaaaaatattaacttttaaaaatgtgtaaaattgtactatattttttatagactattacacacagaatacttttataaacaacaatttcattagtagaaaataaatttataggagtgaaaaatataactattattttcaatacaaataaaaattggctctcaaaaatcaaaatcataaaagaattggttgctctaatctaattggtcgtaggatttactagttaaaagacataacatgatctgcagttacaacttgtttaaatttagtttttttccttatgactttacattagatccttgacttttgcttactgttttatgtttcttttgttcatacatcaagtggatcaaacatgcaaaatcgaatctagtttaggtttatttaagaaatgtttcattcttttttaatatggtttcgaatatttctgctgtttttctcattattattagcttttaggtaatgtgttcttacaagaattatccttgcgcaaatggcttccatgtgctgcttttatttgcttgttgctatgattattaagagttgttattattgctatatccaaccgtcacggagattctcctttcaatttctttatgacaaaatcagttatgtctaaaatttatatgacaatagtttatatttataatggagggtccaattttttttttttttgggttcccataattatgggatatgatgatataatagagaagaaaacattctttggttttttgtataaaatgataacttaccatatacaaagtgtatttatatgaaaatgtgtatttatatgaatacccaatcacgattaggttaacaaactaatagaagaattaaaatattcacatgacgtttgttgggtcgcatgttacgcccgacagatatttgattttatctaattagtaattacagttgttgaatttaacttgcagtatatacgattacgatataaacagtcatacatacgagtatacgactctttcaatataattgtttgttattaccatacatgaatatactaaaaatcaatatttaacatgctaaataattacagaaaatataagataatgtcacacgtccaatatattagattccattgaaaatagcttaatgatatgagtaaaacaattaacaaattttatttggtaaaaataacatgttacaaaataaaaccatgtatctcgtaatagttaaataaaaagagcatataatcttctgaaatgatcaatattacttttcattatgcaaatactattattgaaatatctcaatactgttagagaatgtatgccccaaaattttggaactcatccatataaacaaaatggtgggagttgaatatgttcatcatttcactcgattgctgttctttttccttattcgttttagctttcttctattcttataaatttaaggattttttaagataattgtgtagtaaaaggttggtatgttagctttacccacttcttaattaataactaattaagttgacaaaaattcaaaacagttggtgatacacccttaatcactacagtgaatccaatagtaaaagccatgttagttttataatggggtcctttgcatgagaagaataatagtatatgtttttccaagtggtttagaaataaaatcaaatttatgtttcatctattttgagtaccgactgtgtttgaacaaacaaaatataaactttagggttttaaatagaggatcaattatcatgataaactgagaaaatggtttcataagttatagaaattaactaaaacaccacaaagagaattggtttctcgataactcatgttatgtgctaattgtgttattttacttttctataaagaacaaccaaaaaaagccaggcgagtggaggtcaaatcaaataattcataattaaaagagtaaagcgttgctttagctccatcactgcttatttgcctctcttttttttgtctttcccattttgacttttattcctagacaaaaatctattttcttctttcaatttctacaacttttagtgccatttggatttattttgtttttttcatcaatagacaatgtaacttgatctccgtaatgtgaattttcagtttaatttgatcagttttctaactactacacatattctttaacaaaaataaatggtgtacataacacagtttgatagttccgtttattctaatttataacacttcttgctaatctcactagtgcaattataatttatagtttgtttttgcatcactacgaatacgtgatgaacaatgcatattgaaaagaaaaaaacttgtaaacaattcattttgtcaactcgatattgaaatttaaaaccctagttatattaattgtaagaactgctatatgagcatattaatttaataaaaaggcgcaagaagataattatcccccaaaaactattatattttgtaatttgcatgtatataaattgaaattagcaacaaaacaacgaaaagactgtagccgactttagatttaagaatggatgattttgaaaattgccctatttttgaatttttgtttgaaaaatatattttaccctatttttaattaaaaatataaattttaaatatgttaaatgataattctgtcccaatttaaaacaaaagaaatatttttaataaattaaaattaaatacgaatttttgaaaagaaaaaaaagaatgacgctttattgcactaagtggatgatggtttagttgtctcgagaaaaagtgctcaaggttactagttcaactctacttgggatggatgattaaatcttaaacgtgatattatcaacgattggtcccaggtaccggagaaatttacgtgccaaaggtctagaactcatacgcttaaaaaaattaaaaaatattgtagtcttcatttatatatcgtttcaccggtgaaaactattcgatctagtagagtacaatttttctgaatattcgaaaattgactttagacctaagaagtaggaacttggcttttgtagtgacgtaacttaaagtaagaagcaaactctctgaactcaaaaatgttacttgttgcctaaaaaccggatcttgcttctcttactctcttcgtactgtaataaagttcacaaatttcttgcactacaattgaccaatctatttgccaatttatatattgatcgtagttattcaattcgaattattaaagtctaaaactgatagttctgatatatattccatatcttaagtttgtatcttctttttttttgtatactaaaatgtctggattggtagcggcacgtgatcaaagatatgagtcctatgacaatatgtagcatcgagataatcaaaattaaataccaattaggacattgggttacgtgatttaatcccgtgattaaaaagttacataagtccattccacttgttggcctgttatatccgacactcgattgtcatcactcatcattattagttataaaagtgtaaaattataccatatagataactgtagctatcatttgtttatttcccactcaaacgaaaatagtagtataaaactttttcatacgttgaaagatcgtgtagtcaaatatattaaattcacaaacacgtgagagcccaaaatatgtgtgaatgcagattttcttttagacattttcgtttacagaaacttttttttttcttctctatgaagtaaaacaaaagtttccaacattaatttaaatattttccaagtatcatcaaaaaccttccaacactaatttataacacggattcacgaaacataaaacatttcttttcaaatgtagtattttagatccaactttattattctaatatcattaaaacaatatctatctgtttttttttttttttttgtcagggtgtgcattcactaaacgtggaacaaagcacaacaactgaaataaaacagtagtccctcacatctcacattagaacggcatgaagaaacgagttgttagaatatcacgcattagaagtgaagatgattcaacactagtgtatgatggatatgcacttttcagtttatggccaaatagttttaaattgaagtctatactttttcataatgacgtgacaaaaaacctttgtaatagttgttcttttttttttttttttttttcaatacgccacaaattcttttagatcaaattttcttttatattgaccattattaaaattcaaatgcatgagttactaagttttgattaggaatcccttttgaatgagaagaagtaattttttttatatattatcttatatcaacgattaaaccttagttatagtcctcgaggtactcacatatgggcctatatctaaagaaactataaatgggtcatatactcatatcatacatacgacgtacttattaaacggaagaaaaaatatgagtggaccaagtttcacatagaacccaagtacccaactacgaaagtttaagactttgggttactcacatatcatttttctttgttctgcctgaccggtaggaaacaagacgcacgtgcactgatctgatcaaacggctgcgaaatgtttttctttttaaatacgtaaaatataaagattcaatttaaatgtgaatatataatagctagataggcaaaattatgtaactagtaatatagttttttgtttgactttataaatgacataatgatactaatcgaaaacaaaatctcacctatattatcgagttgacttgacgacaacctgcattcaattgcaaagtgtaaccatacaaatgaattagctgtctctttgacttctaatgcctcgtgaatttacatttgtatcttctctcgtttaatggggaactgtagaacacccaatgatctagttttgttacatcttcttcgttaacttggatcgatatctattaaggtttctgataacgaaatacttgagacaatatttcaatatccttacaaaaatttccgactttggtttaatagatatcaattgccaaaggaatatgctcacacatacattgaacctgaacaaagaacttttgaatacttttaaataaactcatttcgagagatagctttacaaggaactgagagatatatggtcacatgctttttttgttccggcagtcacatgcttttctctcgacaaaagtagatattacgtctcgatgtgagtatatataatggaattgacacagaccgaacggaataatttcctttctcgtgaaagaatataattttaagaattgagttacaatacattctccctcaaaattcgtaatgaaaagttgtactttcttaaaggaaaaaactattgttttataatactttgatggacgtaccacttaataatgtattacattcactacatcacaaagtaatacttgtatgatacatcaagggacagagcatattgattatcatgaaaaactactatagttgaaaatcataaaaaaacaaaagcacattgagatacatatcatataatgggggaaaaaacactcatacgcctaaaaatttccaatgcataccacttcatgttcgtagatttattcagaaaacgtgtagggtatcaggataatgagagaaacattaatcaaatctcacgtgaagggatgcagagttagtaaatgagatatacaagtacgattgcggaccacacatacacttatacatgttactcggtcaatgtcattaatatttaatttgaataagaaaataccaactacataaatgattagtggtaatagtatatacaattatgggaaggaagaatttggtagtagatacgatggaccaataagggaaaatctcataccgtatctccattaatgacaccttcttgtttaatctataaaatttggcttcgataattaaacagaatcttaagaactcttttcgatatctcttaccttatctaactataacttgaaagaagagaatgaggaagctcacgacaaggttcatgttggcattggaacatgtgcaggcgacgttttttgtgcggtacacggctgatgtacggtttaacgtattcctttgtatatgagtatcatgttgacaacaaataaaacgacaaaggaaatgaactttacttcaacataaatcttttagacatgttaaactagcttatatcaaacaatgaatagtaacgataggctctcaaaactctaatcgatctatcctgtcgttttcgatttacgtaagaatcttattagtatctttttgaatatccaaaataactgatttttgtatataaaaagtagtaataatattggcatacaggctggcttctttagtcagaaaagtctctgaagaatccaacaaaaaacctaaaccacttttaacgtcatccttatcttcgttttatttttcttttaatcagaaaatcaaaaacaaaaacagaagaaactggaatcactcaataagtatggatactttacttatacgtttctaatatgtatagatacgtcaattcaatacgcaaaatacaatttcgaaaaaagcgacgtttgtgtttcagtgcttttaaattgaaaacaaaatgtgttttcacacaacaaaataaaaaataaaaatattcttaaatttgttgtgaaaccaatacaaaatacaacgttcaaaaaagaaaaactaaaacgacacacgacatatatgattttataattaaagtcgaaggaaaacgtaattttttctaaatctaatgaaaataccaacaaaagtttttaaacttaaatcgaaagagaccgaacccaacaactaaaatcataagcaactaaacacaaaccctttaaaaaacattagtcttcagaatcaataaatcctttattttgaaataactacggataaaatttattaagtatatgcgatcaaaccaaagataacattaattactttctatcgatataagaaacagtcccgtctcaagctataattgagcctttgccaaaataaaaataaaaactaaaatctcttaataaaattttgttttaagaaaattgggccttttatgcttatgattgtttttaaaatcagtaatagatccatggcatttgcctaatttgccatggggtaaagacggtcttgataagagtcaatctttcacaacctaaactaaagattttataatccgacaaataaaacgaccgaaaaaacttaaatacgtttttagatacgacaacgataattaatgtgcatctaattacgtttaaatagaaatcttcaaaaattcgaccataccaacactgatatgcaaaggaaaaacaaagaatgtaaccttcaaaatgcaaaaagaaaagataattaaaaaaggaaataacttaaaaacgaaatgatttaaattaaataaaaaaacgatccacctgtgaaacgctctcaagtaccacaaaatgtactctctctatcacacacagttacatatttcgttgacagctgtccccactaacagctgtttcccaaatccccaaccgttttcttggaaagattctctctttattttagcctcactctctcagacgcatttcccccaatcgcaccgccactccctgacgtgcttttttctttctcttttaaatattcaaatacgtatcagactactcacgttacatcttcttcataactaatccaatttagaaattacgcaaaattacttaaatatgtagtttttctaaatagttttacataactacaatatataagaatttttaatttgaatttattttttgaaaaaggtttgcatttataatttgatgtaatatgatttgattttagtttaatatctttgtttagttatagttagaaatacagtacatgtttagttataatttaacattcattaaaaaaacattacataataatttgtttaatagtatatattttaataaattttagtttagagtttattttgtttggttcaaactaaatttcagttttctggattttaaaataataaaacaaaacggcatatacttacatatttaatttggtgtcagttaacttatttcaatttgattcagttgaaaacataattatgcacgtaaataatccaatttacagttacgaaaaaattaagttgttgttaactaacgataaaaaattaccggtagaaccggtgacctctctaaccatcacacctcgtataaatactctctcctcttcatacttatcctctcaacaaaaatcgtttcgttcttttccaaaatccccaaacaatagaaacgcgttttaaacgatttgattagttttaaattaaaaagaagatccgagcgatgtctggttcgacccggaaagaaatggatcggatcaaaggaccatggagtcctgaagaagacgatctgttacaatcgttggttcagaagcacggaccaaggaactggtctctgataagcaaatcaatccctggacgttccggtaaatcttgccgtctccgttggtgtaatcagctttctccggaggtagagcaccgtggattcacggcggaggaagatgatacgattatactagcgcacgctcggtttggtaacaagtgggcgacgattgcacggcttctcaatggtcgcactgataacgcgattaagaatcactggaactcaacgctgaagcggaaatgtagcggcggaggcggcggaggagaggaagggcagagttgtgatttcggtggtaatggagggtatgatggtaatttaactgatgaaaaaccgttaaaacggagggcgagtggtggaggaggagttgttgtggtgacggcgttaagtccaacgggatctgacgtcagcgagcaatcgcaatctagtggatctgttttaccggtttcttcttcttgtcatgtttttaaaccgacggcgagagctggtggagtggtgattgagtcatcatcgccggaggaggaggagaaagatccgatgacttgtttgaggttgtctttgccttgggtcaatgagtcaacaactccaccggagttgtttccggtgaagagagaagaagaagaagagaaggaaagagagatttctggacttggtggagattttatgacggtggtgcaggagatgattaagacggaggttaggagttacatggcggatttacagctaggaaacggcggaggagctggaggaggagcaagttcgtgtatggtgcaaggaactaatggtcgtaatgtagggtttagagagtttattggattaggtaggatcgagtagtgagtgagaaaagagaagaattgtgtagcaaatgcagagaaagagccaatttcatgatttgagatttgattcattcgaaaaaaaaactgaataaatgtattgattttgatcatgacatgtcttagatttaatgaaattggtctataaaagggttgatgaggctggtcctcgaggtgaatcaatgttaccttttgataaagtgaaagaagagcatgaacaaagtcatttccatacaaagaggagtttacagcattcttgatctctctagactggtcttgcgattcgaagagtgaagtaatgaattctactgaaccaagtgacgatttccgtagtttgttaccttcggttaccgactatagcatcgcagtaaaggttatagtgtgagagacaacatcatatatagatattcaatgaatgatacagagtgtagaacagatcacctcaatacaactaactgtagcagtaaggcctctaccggggaaatactcaaagcacaagggaggtccttcccaatactgtggctctgcaaaaaagaaagagtttgattgtgttaataactatcaagcggtgtaagattactgatgtttgacaagcaaataccttccaataggatgtatggtacctttctccatagcagctgctacaactaatgcttccttttcacaatttggcatacaatacaacaaggagtcacacttgcatcaattcctgcttgatgatgtccataaatgggttcaattgctttgcacgtaaggctcctaatgtttacctatataatggagaagaaatatgcactagatatgtgtataacttgttgtccaagccaaatttccacagctccatccggaacaacatccttcagaaactatctaaagaattggttaacttcaatttccacggaaatcgcgatttcttggttaaagttgaagtggatgtagctgttaaagaggtaagcttaggtgattatcactcagaagaaggttaaagttaagtcgcttctttttgctttgtggatttggagcttaactatgttgttattgaaactcattaaaaacatgaatatccagttattcattcacataatcagaataataaattaattacaatatatattacattgtacattattatcaaatgaatttcaataagttaacaaaagaatattcctacagagaacaaatgaggttcttccaattcttgattttcccaagttctaagcataaaaagaaaaatctgaataattaatctgaaaaaaaactaaacaaagcaatcaatttccggagctagaccaaagcagccacattaactggttcggtcgggaacttagtgaccgggtccactcgtgctgggacctgaatgcttaccatattcaagcgtctcagtccggtccacgaaccgatgaccctcaccaccagagctaggacccgactccttaatcgccccaagtgacaaaccatcgaagaacttagccacgaggttctcttcagccttcgttaaacccaaaggacgagcctccaccacaaaattcgaactcaccaacatgaaaaacagaaacgaacccaaaacaactttgttcatcatcattttctttgagtggtatttttgagtagtaaaaacaaaaatgttttttattttatttttcttgtgttccctaatttatgagatgactaaatttgttgtgagtagtttgtggacttgggagttagaatatatagtaaagtgaagagccttgaagaagaagaaaagtttgacattttcagtttttgacttcataagcttaaaattcaacaagacgtgagatttgaattttaggctccttcctgggaaaatactgaggttgcttcttgttcttggtcttccaatttctttttaaaaatataatttgcgaacatataaagccatcaacgaggaatggagattagttatttggctgaagaaattaaatgattttaattttgtctctgattgtttggaatagacttttagttgtagaccataaactatgtgtggaattcaaatctagtatggtattttatgtttatctatataatattgtgacaaaacctaatgtcctcaccttccttcaagtatactataatcactgtagatgacattaactcaaaaatgttttatgataagagttttctaaggattgattaccacaaacatatatttgatgatctaaatagttacataatttttcataaccattttcactacttcgaccgttaatttgaaagaatactaaattcactacttctaccaaattaacggtcgaagtagtttttagttgaaaattaaaattgttgggtgggcatcaaacttgattgatgttacaaaatttcaggccccaccaatctatctatgtacttttcttgtttctcacgttgttgttatttccattcaaagtagccttctttgaaatgttcatgagcgaagtatcagattgttgatatttcaacctttgtgtgtgtattttttttctcaaaaccatccttaaaaatcgtttagtggaacttaatgtatgacgacgaatatgtgtatggaggacttttctttttaagtacattgtaaaattttctttatattttcacattcattggttttggttataaaagaaaataaacctgtagattagaaattaccgaaaatgagatctgagttggatggtacataaaaaaacacgagactcacctattccctatgttcctttttgtttgattttttaagaaaaatatttcaaaaagatcgatgttttaaattttctatgtaatatttattaattattatcaatgaattgtaaactttaataaaaatgattgaatatcattgatttaaaattataggaaactgtaaaatacaaaaaataatacatttaaaatcaacattaatatgttttcttaatatgtgcatttttctaaacaatcaaataaaaaggaacaaatggaatatatgtttgggctatttatacattctagcaaattaacattcggtttggtacatgccacttaaacacttttctttttattccttatttattttggatatcttatcgttgaccaaactttatttcaaatttaattctatgtttcatacttttttactataaaaatgattttataaataaagaaacaatactaaacagatgtgaaaatcttgtgaaatttttgacacatacaaaagttgatcattgtaacggtcaagtgtcacactaataaacaatttttagttaataataagataaaaattgtaactgacccgatgaccaatagatgaacatacttggtgaaaaggtggatactaaagaatctacttgctaacagttgactgggttagccattactatagacagattttcttaccataatctaattttatgtcttcattaagcaaaatctctcatcaaaccaccattgctattatatatgactcaaagtttcatgaaaatctaaactattagtgaaaaaaataaaaaataatgggcagtagtgagggtcaagaaacacatgtcctaatggtaacactaccattccaaggtcacatcaatccaatgctcaaactcgcaaaacatctctcgttatcatcaaagaacctacacatcaatctcgccactattgagtcagcccgtgatctcctctccaccgtagaaaaacctcgttatccggtggacctcgtgttcttctccgatggtctacctaaagaagatccaaaggcccctgaaactcttttgaagtcattgaataaagtcggagccatgaacttgtctaaaatcatcgaagaaaagagatactcttgtatcatctcttcgccttttactccatgggttccagctgttgcagcctctcataacatctcttgtgcaatactttggatccaagcttgtggagcttactcggtttattaccgttactacatgaagacaaactctttccctgatcttgaagatctgaatcaaacggtggagttaccagctttaccattgttggaagttcgagatcttccatcgtttatgttaccttctggtggtgctcacttctataatctaatggcggaatttgcagattgtttgaggtatgtgaaatgggttttggttaattcattctatgaactcgaatcagagataatcgaatcgatggctgatttaaaacctgtaattccaattggtcctctggtttctccatttctgttgggcgatggtgaggaggaaaccctagacggtaaaaacctagatttttgtaaatctgatgattgttgtatggagtggcttgacaagcaagctaggtcttctgttgtgtacatatctttcggaagtatgctcgaaacattggagaatcaggtcgagaccatagcgaaggcgctgaagaacagaggacttccatttctttgggtgataaggccaaaggagaaagcccaaaacgttgctgttttgcaggagatggtgaaagaaggacaaggggttgttctcgagtggagtccacaagagaagattttgagccacgaggcaatctcttgttttgtcacgcattgcggctggaactcgactatggagacggtggtggctggtgttcctgtggtagcgtaccctagctggacggatcagcccattgacgcgcggttgcttgttgatgtgtttggaatcggagtaaggatgaggaatgacagtgtcgatggcgagcttaaggtcgaagaagtagaaagatgcattgaggccgtgacggagggacccgctgccgtggatataagaaggagagcggcggagctaaagcgcgtggcgagattggcgttggcacctggtggatcttcgacacggaatttagacttgttcattagtgatatcacaatcgcctaactctttacttcaactagtacaaaatgtatgaatacaaggtttgatataaccactatcaattgttagaaaaccaaactgatgaatggactctggaccaattgttttttattcgatcaatacctcatgcttcattacctatttctttgtgtcgatattgaccaaattaaaattgtatatttcttgacaattagactatatattctaacacttttgtgtattattctaattaattccttattgattccagtttagttttttccattgtttttttaatcttcttttgttgaggatattataaattattattagatttatttaatttgaaatattatcaaacattttctaaatataattagaaaatatataatgtttaacactaatatataatctttttgttaatataataaaatttgtaactagctagctgaccattatcaaggatcaatcataggaaatgattgatcaatcacatattctaatcagtctcaatcatatattctaattattctttctaatctctcttttatgtaaagtagatattgacaataactctcctgtacgtgtatatattcttgtcactgtgaatcaataataatcatccattacggaaaccttcataaccataaccatactagaattggtaagagcctaattgttttttataacaattgtacaataatatagaaacacataattaattttgaatttattgaccaacatttattgggttatcacttacaattacaatagatacatttattaccaaatcccacttcatattaattaattatgcaaaatatattgttgaacaaccattgttatatataccacaacaactagagctcataatacctctaaatttattactattactatccctaataatgggaagtaatgagggtcaagaaacacatgtcctaatggtagcattagcattccaaggtcatctcaatccaatgctcaaattcgcaaaacatctcgcacgaaccaatctacacttcactctcgccaccactgagcaagcccgtgacctcctctcttccaccgctgacgaacctcatagaccggtggacctcgctttcttctcagacggtctacctaaagacgatccaagagatcccgacactctcgcaaagtcattgaaaaaagatggagccaagaacttgtcaaaaatcatcgaagaaaagagatttgattgcatcatctctgtgccttttactccctgggttccagctgttgcagctgcacataacattccttgtgcaatcctctggatccaagcttgtggagctttttctgtttattaccgttattacatgaagacaaatcctttccccgaccttgaagatctgaatcaaacagtggagttaccagctttaccattgttggaagtccgagatctcccgtcattgatgttaccttctcaaggagctaatgtcaataccctaatggcggaatttgcagattgtttgaaagatgtgaaatgggttttggttaactcgttttacgaactcgaatcagagatcatcgagtctatgtctgatttaaaacctataatcccaattggtcctcttgtttctccattcctgttgggaaatgatgaagaaaaaaccctagatatgtggaaagttgatgattattgtatggagtggcttgacaagcaagctaggtcttcagttgtttacatatctttcggaagcatactcaaatcattggagaatcaagttgagaccatagcaacggcattaaaaaacagaggagttccatttctttgggtgatacggccgaaggagaaaggcgaaaacgtccaggttttgcaggagatggttaaagaaggtaaaggggttgtaactgaatggggtcaacaagaaaagatattgagccacatggcgatttcttgcttcatcacgcattgtggatggaactcgacgatcgagacggtggtgactggtgttcccgtggtggcgtatccgacttggatagatcagccgcttgatgcgagactgcttgtggatgtgtttggaatcggagtaaggatgaagaacgacgctatcgatggagagcttaaggttgcagaggtggagagatgcattgaggccgtgacagagggacctgccgccgcggatatgaggaggagagcgacggagctgaagcacgccgcaagatcggcgatgtcacctggtggatcttccgctcagaatttagactcgttcattagtgatatcccaatcacttgaatttttgttgtttttcaatttgtaactctgtttctgttttagaattagttatctttagactgagcactttaacttgaaattactatagggccggtccaatgcttctaaagttttctaaatgttccatgcacaactaaaaaatgtgctcttttgtaacatatgaaaaccctaataagaaaagtttaatagtacaataaaatcgatcaacctcataacacaacacatcatcactattcacaggtgatggtagaccttttttatgttgatcaaaagaccatgtccttagctatttagctactatcaatcaagttctaatgtaaagagatatttggtgctatttaatctttagtgctgacacctgacatagttagagctgtcaattggacagacggtccatgggcttgcccagtccaaatgcatatggacgggctatattccggaccataaaacaaatggtccaattgggcatatgaccagttttgtccgcggataatatgggcttgaccatatggacaatgggctgcccatgggcatgaattgagggaaaaatacaattctccgattttacgattttgacggaaaaacgtaattccgcaaatttcctctaaaacgggattttattatattggcgagaacacaattttacagtttcgacgggaaaacgcaattctccgattttacggttttggcgggaaaacgcaatttttctgccaaaatcgtgattttattatattggcgaaaaacacaattttacagttttggtgagaaaacacaattctccgttttggcgggaaaaaacaattttacgattctaccgttttggcgggaaaaaacaatttcagaatttttccgccaaaatcgtgattttattgtattggtaagaaaaacacaattttaccgttttgtcggaaaaatgcaaaatgcaaaaacacaattctttaaaatcatgatttttaatttatcaataataaaatgggttatacatgggcttgcccatatggacatgatttttattggtcatggacatttttcggaccattgtccattatggaccgtccaacttggcccatagaaaaaactgtccatacgaacacgcccaatggtccctggacggaccatttgacagctatagacatagtccaaaagtaaagtaacaaaactagggtcttgagaagggcttataaaagaggagattttagagcataccaaaaacaattcagctttatctaattcttttttttttcttttttggaaaccatttctttgaccaaaataaaattgtaaaattttcagtattctatttctttgtcccaaccgaacatgcttcgtcacgactcgggatagaggagaagttgtcacatgacacatgttacctacatagaggccacgtattcaattctcttgcatcgctcagtattcttatctatatgaaatgtaaaaaggatgagctagtgagataaaaaaaaggaagagaaaacaaaaaatggcagacacaggcaaaggaagtgcaagcgctagctgcaacgatcgttgtggctgcccttctccatgtcccggtggcgaatcttgcaggttagttttttatatatatgatccataaaattgatattatgtgatcttaaaaacgttgttccattccatgaaggtgcaagatgatgagcgaagcatctggtggggatcaagagcacaacacgtgtccatgtggggagcactgtggctgtaacccttgcaactgccccaagactcaaactcaaacctctgctaagggttgcacttgtggtgagggctgcacctgtgccacttgcgctgcttagacatccttaactatggttataccatacttgtataataggtactactagctagtcgatctgaaataaagctgcacaacaaaatatatgtatcgtatgctctgcttcttgtgtttcctttttatgaatcaccgagagtttgtaaatccttataacttcaagccttcaaggtcttgcaccaatacaatccactatgtatagaacaattctctttttttttttactctattctagagtaaaatatagaataagattagagagaatattactctataataaagtttagaggaaaaaatagagttgtagatatatacttttagccttaggttaaacttttaaccaatatatagggtacgtacccttacatttccccaacgaatgtactatccaattgattttgtccttaatgaaatcattgtgagaagaaagtgtctaaatgttgtgtgttggattttttagtaagatgttatgtatctgttttgggacgtatgtttttctttgatctatcatgcttcatgacctaaatttgaaagatattttatgcttaattgacctgtttattggcattagatgtgcatattacatgttcaataaagctcataaggtagaagaagatgcatactgcatcacaggagcatccatgtgctcgacaaacaatgattcgacatactctgtgaattttcctctgggccgagtgtacccgtcaccggatctgtaagtaacatcgatcattttcccacaattaagggcccgagataggatttcgcgaggcactcctttatttatcttcaagaactccgagttcaccgacttctcgaggtctctaactattttatgaaactccttatatgtttcctcttcggtagttccatattccttcatataatagttgactacgtttgcgagaaaacctcgaccaatgtcatcctgtttcataccattcatatttacgtagccaaaagaataattttgaaacaatatgagtcgtatatatgtaccttgaagcctcccatgtcattcatcagacgaccttttgttgccaaatcgtgaacgagttttggtctagattttagccactcataaccgtgttccctagccttcggtcctaacccgagaagtcccaatgctatagttgcatacattgtgaccgctacgcccccaacctccaaatactcttcaactgttggcactttttctgccgctgcccactcggcaaagttaaggtgggttcgctggagtatcgtgaactgcattattaggagcacatgcgaatttaaatgaatattctgtttctgctatcatattatcaaaagattcgtgagttaataatggcaatgggccgattttgaatgttctgtaaaaagtttccgagtcataaaatgttataaatggaatgtagaataacatgtaattttacataaattagtttccattaatagaatgttatacatttttaaaatagatatgttgttatttgttttgccaatataagatgttattatatcaataacactattatgtattacctcggctaatgcaccatcgacattgaagcttagtccttcttcactcttccccgctcgttcacaatcttcaaaaacatccaaagtaaacttgaagacggttttcagataatctggcagactctccccaagttctggatcccatctgcacgtacatactattggatattggtctattgaatggtttaagtaaaaccagaaatttattgtaattacattaagtaaaccagaaccctctcctatataaaatcataaataggttccaaaggtaatcaacatatattgtgagagaaataacagattttattctacttcttcttttcattgaagttctctcaaagactaacacatacgaagatgataagtcattaattaagcttacgtattatatgtatagcatattacctttcgacacaatcaagaagctttgcaacctcaggaacagaaccatatctgtcgcacgtatcatcgacaacggtcaagagtaccaataacttagccaacatgattctgccaaatgaatattgtggctcgaaataataaatcactgcatataaatggcactccaccattctgtctctaaagtaaggtgggagcttagataaaagatcttgatcattccaccatctgcaaaacatatattagagcggccgattgtaattaatccatgaaaacattgttagaagcgactgatacagtaagtagtctacttggtgagaattttcagctcgtgaatccaatggagttgaaggaacttgaaattgagcttggcgaactcgagtaggactttgttgtgaacatcttcttgtttatagaaggaaatgtattcgcttgcgaataatatttcagcattgtggtgctgaggcatgtaaagctcattttgtataagccttgagatatgaggcgggcacgttccacctgctaaacactccaagtgactcgacgagaaactcatcgcttcgtccaaaatatcttcagtgcttgtacccaattgtgcggcttcatacaaacttagcagacctttgacatcttttgtatgacattcttcaaactttccatcctcccctttaaatctcctaaacatatctgtttacaaaatagaccattatttaaaggagacaagtagtatagaatacatcaataagaagcctagcttgatacaatgatactccttaccggaagacaagttatatccatatgtcctgaaacccaaaacatgaccgaaaccgtggacaagtcattttcaccggccatagtggtctctatattttcgaagccgtgtttcagattatcatctatctcatcctcgaagtggtatgccataccaagtgcaaccagcaaatatattataagaattctctcctttgtctcctccacgtcttgtgaatacataagcatcttccttattgtagactttagtgcgttcatctctattgtaagcatatccatatcctataagaatccagcttgttaatataatatctcctgcaccaatcctatatatatatgtgtgtaatgaactcactgagacattgaagggaagacgaaggaaatgatcaccccagtccgaacgtggaaacttgttaaacgtacgctgactttcaacaaggtcacaatccgtagtcttcacacataccggctttgtaggcttacgagcaaatgatgtcagtggaaagcgagagagtttgctcaccacattcggagaaagaagagagacttgagttccatattttggtccaaaaaatgtcaaggttttcatggtataaactttgttgctagtggatcacgtcaaaagtttggctaaaatgtcgatagaatcgaaggtatttatagacatacatgatcaaagattcatgaacgacttagagcatgtgaccacaggtttgtttttgctttagaccttatctgtcaaattgttcataccgtgttaggattaatatatcttaattacgttacatgtgtgtggcgctgattagtaactcttttttttttggtaggaagtgggaacgctgattaagtaacttggttaatgtgcatatgattttcttttaaatcttaaattaactaattacaaacaagtgtataattacaagagaatgaaaatccgcactaaatttgaaaaccgaatcttatttaaagaaaaattatttatacttatatgtcaaatccacggtttttacttgtatttgaaattaatttatttttctactattcttattttcaaacattttaactaatactattactacccttctttccaaacaccttgactcttataattatctttctttccagacattatgaatttcataaactagtcttattattcaaaattaaatatttcattcaaatagtatagcttcaatataagatttaattataatgaatgtactgtaatttttaagtggatattagataatataaacatatattcattttatatagtataaaccataaatctatatctctaaatttatgaataacataaatgatactttatttgtataatataaatcaataaatatttaaaatataatatataatttatatactaaaattttgggctgttgcatgatatttatataacaatatcttaatttaaaatattttaatgccaacaaaatttggttttgacatctcgggattataatgaaaacaataagtttcttttaaattatttttttctataaaaaaatttgttctaattattcataacaaacaccaactatctatatatacattaacaatggctgccattaacttttaattattgatttttttccagcaataaattgattaacaaactaaaaatattccaaatatattcagcaactatttaaaacaaaaaatgtttgacaaacaaaaatataattgcaatcccttaaaatgagcaaaacccacctaaatacattctttatctatccaataaatcttttttctccaaaatttgaactagattttggcaactattttaaacaaatatttgttttgacaaaccaaaatacaattgcaatcccgtaaaatatttattttaattatatatttaaatttgtagtgtaccgcggttttttttacgggacggatttggcgagacgggtttggtaggacgttacttaataacaattgtaaactataaaataaaaataaatagatttaatttgcaaacttttttatatactaatttaaaaaataagttgtttccgcggtatatcgcgggttaaaatctagtagttcttaaaatttgcaataaacacagaagttgatctgagtttagcgttgtgtttacaacatattataataccaaacaaaatcactatatattttgtaatcgtacaaaaacaaaagatttctcataaaattaaatatatatatgtttgttttatatgtccttatcttttgctgagttaatttggtttaagtatttcttttcaccattataaataagtttttaaataactatgaattataccttaatgatttctgttagttttcttacagtgaattattatctgtatttaaatacacaaatttcaaatcgttatatatctacttaacacatctccttagtctaaccaaggttcaaatttttctatggagtaatttctctacttgtaccatcacatacatcttctctgtcagatattgtttgcttgtgtataatgtgttggttgccgttaaataaaggcattcattcatttctagagtgatagtacggagaaaccaagccaacatagtatcccctatggctaagcttataagagattaaaagacaagtatcatatggagcatacaccttttaatgatatgtctctatttgtaatgaattagttgatagctttgtttgcttcttctttatagaattccattatgtaaacgaacccatgcaacaatgctttgttctttctttcttttttttggttaaacaatgcatttattgcatgtgcatgaattcttccatatggcatctcatgaaacatttgtctctaacactctcataagctaagataactcatagggaacgtggcaacaaagattctctgccggatgattctacattaaaagaaaaaaagattctcggtaattttacattaaagaaaaaagattccctgtaattttaggagaacaatgtaaaagaatgattcaattttttaaaatatatgaaaaaactccaattataatttttatctgattcactaatttttttaatcgaaccaaatagcgggttcttaaattggagtttaaaaacaaaaaatgattaagagattaaaattttaacgataactcacaaaccattctttggaaccaaatagtgggttcttaactcaaaaaccgttgattccaaagaatggccgttcaacgaaggttgttgataatatcgttattcacgaagaataccgataaacaacgaagaggtgagatcaaaacggtactgaaaaaaagaacccaaagttctaatcaattcattaattaaaaaaaaaaagatgatcgctgcctaatctttttgaccacacaaaaaaaaaagaatataagactccgacgtcgacaaaaaatcaatgatgatccttgtctaacttgcgtaaataagtaaaatgattgaaaaagcataatccagaagcataattcaccttgttagaagcataatccaccttgttggaagtaatccaccttgttagcagtaatccacctagttagaagcataatccaccttgttagaagtaatcaaggtggattgaaaaagcataatccaccttgttagaagcataatccaccttgttagaagtaatccacattgtctaactagtgacgcaagaaaagtaaaacgattgaaaaagcataatccaccttgttagaagatttgtatttgtaattgtatttgattccactgtacgtaattgagcaaataacattgctttcaacaattatttctcatacacaaaattgagtaatcgccatttcccttttttttttttttttaaccacaaaactgaaacatgtatggtggttagaagttatagcttagtttataacgtaagctagagctcaaattttggcgttgtcatggaattcaccccatacgtcactaaagttatgttcacgtctcatgcaaatgaaattaaacaagtgttgaattgaaacatgcatggggtactttaacaaaaaaatcatgcatgggggttagaagttatagcttagtttataacgtaagcgagagttcacgtggagcatgatgatgaaaacaagatgttcacattttggtgttgccatgaaaatgatgacattatccccacccgtcactgaagatctgttcacgtctcatgtaatatatcaacattaagaataaatttggatcctccagcacaagtagcataaccagctatacaagatatttgagtacaagaattcagctaagttatgaaaattagcaatataaaacaaagaaatgagaggttaaattgagaatcttaaggcgtgactctcggtagattcctgcgagaagaatttgggtgaaattaatttcggcgtgattatctctggtgtcctgcgagtagagatggtaatgaaactttttttttttattttttttatttttttttttttgtaatgtaacttcacatgaatcccaaccaatttttgccaaaattttaaagtaaccgatgatttggttgtttacaaaattgatgtacgtacacgatttgtgactgtacaaactgatatcatcgtatgttcacccattttagctatccttttctagtgttttaagaggtatttggaatgatttcaaaattaaaaggataatttttgagtattttcagtgtcaagaagcttttacaggttttactgttttagtataaaaatggttcaaaaaatgacaaaaatttgtttaaagacagttttggagtttcctaagtttcacatccgttgaaaatcttgccgagcgtcaaatcaagagattttggaggcagtgaaaatttggaagagtcaatatctgtagcaaagttgaatcagattcatacgataaacttgtgatttttaatgcccgattgaaggaagaactgtcatgtgacctgtcacgaaccacctcctgggaccgggaacagctaacgtgactggtgtgaagcttacccgtgggaccgttcatagccctcgtggccggttcagaagatttcgtctctacaacttaccaaaattctaagtttttaatgttaaaaaactctaaactgactttttggactccaagacttataaatactcattctaaaaccttaaaaatggtgtgctttcactgtgtctccaagagcctccgaagttttaaagcagccacgacaaaatcagcctcttattcgtccttgaagccttgaagatcaccaaaacactcttgtgttttttttatcgtttgttgctttcattcataagagagaactcttaactttttttaattttcaagtttctccctcccaactttttttaaaatttttaagttttttatcgtttaagctctcaactttgtgaacggaagagcttaaaaattgtaaaggccactacaaaatttacgagttcatgttccaaacaaaactttgagtcttgacttgaatgtgttcaaaaatccactaagaaaggtagctcaaactcgactcatcatggtttcttcatctgtaggtgatctattgttaggatttacatgattaacttgtactataacttattatacatcataaggtaatttattcactaaactgtgtcctaaccagatacaaatgaatatatcttccttacccaacaaaaattaagctgggagtgatttatgagcttattgaatttgaaatcaagccacatatgactttctatttgggataataatatcccaccagaagttgagcataatcttaagaccatctccattggttataaaaatagaagatctttaaatataaaataacaataaaaagaatttaaagaaccaagaagagatgaatgtctttccaaagacacttaataccttttaagacttagttttaagacactcaaaagagtgttccactttcaccaatgaggatgctttaagtggcatatacaagatatagaccaatccattcattaccaaatagttttgagttaaaaattcatatattgtaatatagtatcagagctcgatctatatatgttcaccagattcaaaaccggtccgatccaatagttggtatgtcgacccatgcttaaacatatagatatcaacaactaaaaaaaactacctgtaaaagacgtattagggatccaacataaaaaattgaacatgaacttaaatataatttgcaaattgcttctgggttgaaaccgatattctaataatgtaaagggaaaatcgcttatacttgaatcacttaattaaatgacgtctctaggatttttttttcctcaaattgattgaagattataaaaggacagttatgtattctctttggtttacaaacggttatggttaatcatattagggtttgttttgcttgaattttgttttgatttaaattaggttaactgaattttgtttatttttacagttttgtattttcttttgataccaacaaaaaaaaaatgtgtcgtacttgtggttcaggaaagacaattattctaaaagaacccatgagtattatgtgaactcatgtaaagggtacatgtattttttttaattaattttccaaaagacaaagaaaggagagttaaacttcaagcaaaagcatcaagaatctcatggacaatgggacgagctttacacatggctagcaacggtgtcgtaggacgcatcaagaccacagttttgtcttcactattgtcaacatattcttgtccaattctctgccattcgaaacactgaaccatcgatccaagagtcaagctcactacccgatgagctaggccatacccgggacaggctcgtcgtcccatcccaaacgacaacaacttttgatttagcttttcatttttgaacctctctggcttgaacatttctgggtcttcccatatagacgggtctctatgcatggaccatatgttcaccaataacatcgaaccacgtggaacatcatatcctgccaacatgcaatcctctgacgtactatgtggaacatttgttggagctgccgggtgaagacgtaaggtctccaacacaatccattggagataaggcagatttttagtatcagcttcatccattaaccggtcaaaaccgattttcgtatcgatttcggtcctagctttctttaatacttctggatggttcaacacattcagcatcgcccattctaaagtccatgctattgtttcagatccagcaattatcattacctgtaaattcaaaatcaaaatcaataattcgccaacataaagtttgattattgttcttacatatagactatctatatggattccttaatacttacaattataattcctttaagagtgacatctgtatagtaatcaggctgagattcttggagagaaagcaagtgatctatcatagtggtacccttttctttatccgcacgtttctcatccacaagactctgcaaaaacttatcgatacgaatcgctaaattcttgacgcgtttctcaaaatttgtgaaccaacgcatgattggtaaatagtcggctgcattcccggcgccagcgctggtcacaatctcgtccatcagatgtctcacttgctgcgcaacttcgtcttgctctgtgccctcaccataaaatcgtttcccggctaccattctaaaaacgttattgatagtcaactcaaaaagcaaatgtctcatctccaccttcgcaaacccctgattttataataacataaaaaatgaattattctcaaatttacattttcatacttctcaatcttttttttgggttttgtgcaaaacaaaaaacctcaaaatcatctatttttacaattttactctatacgtctaaaaatacgaaataatcagatgaaatccaaaataatacgcaatatagctcattattgtaattttacatatattgtaaacgtttttccgatcacatacatttgtttttaaaaattctgaagatatagttaaactcctcatctcgaaagcttcgatttgatatattaataccaaaattttaaaatttaacaatagcaaaaaaggatttcatatgattattttgtattttttggatgtaaaggctaaaattgaaaaaatgaacgactttgagttttttttgcatgaaacccttatatttattaagactgtatataaaaagaaaatttctcctttcggagtaatttaccatgtgcatatacacattgccggggttagggtttaggttatagatatttagataatgtaaagatatgtagaagctcacaaacatgtctcgagtttttggagagacgtagtagcaactgacggatctcatccttacggacagataagaagccgttgagcttatgtgatgcgaagatctccagggtagcaatgcggcgcaagtttcgccagtggtcaccataaggcgcactagtcatagtggtggagttgtactcaatatgtttcccgagaattaactctggcctattggcgaaaacaatgtcgttttttgtaaaacattcttcagcgatggagtatgaagagactacaaccgtgagacggtttccgaggcggaggcagaaaattggggcgccacctaaggattgagagaaagagaggaatgtgcggtgaagcgggagtttcaggaggtgaaggtgtccaatcaacggcaggggcctagccggacttggtggtaggttaaacttgctaagccgtttaccaaacaaaagtttaacagaaatgaaaaggaagaaggcgagagataaaagtaggaaataggtttccatatttagatctaagaatttgtaaatgtgttgaattgaaacatgcatggggggttagaagttatagcttagtttataacgtaagcgcgagagttcaaattttggtattgtcatggagtttatcccacccgttactaaagatatattcacgtcccatgcaattaaacacgtgtaatatatatcaaacattattaataaattcagattggccagcacaagtagcatagagctattcaagatctttgagttcaagaattcagctaagttaggaaaataggcaacacaaaaaaaatgagaggtcaaaatgtgcggggtaaaataatgattaaataaatacattgtagttaactacaaatttattgtatcatcactattcagaatccgaaacttgtttcgtaacaaaaaacatgtactatattttattattttattgaagcagagatttttagtatcagagttagttttacccgtaaattgattgaaaaacaacaaagtgcattccttaattgcatatgttatcaatttaaatgtgatctcttttttatttttattatttgtgtgagatatgtataaataatactaatagaaaatctgttaatattctagtaaatgttagacaatgaatgaaatagattacaaatctctacgaacacaacatgtcagcatgacattttcattaataacatataagagtaagtttttattaagaatgtttctcaattaatatataaaggataatatatatataaggaataataataatcacatgacaaaatctcttaaaattttaacacaatgtttttttattaaatatcattagaaaattgtactcaatatacactctttttaactaatttgaaacaagttcacacttctgtattatataaaattttagttaataagataactttgcagctggctgttgacataattatgctagaaattggtaagaacatgatttcttgccacaacaattttacaagaatatagaaaatcataattttaaatctgttgaccattatatattgggttagcaaatcataatgatatattacaaaaatctcacttaatattgttgaagaacaattgttatatataccactaagattaaaactcataatttttatacgaaattcaagtctaatacctctaaattactattaaaaagaattattactactaaaagtctatacaaaaaaaatgggaagtattgagggtcaagaaacacacgttctaatggtagcattaccgttccaaggtcacctaaatccaatgctcaaattcgccaaacatctcgcacgaaccaacctacacttcactctcgccaccattgaatcagcccgtgacctcctctcatccaccgatgaaccccatagcctggtggatcttgtgttcttctctgatggtctgcctaaagacgatccaagagaccacgaacctctcacagagtcattgagaaaagtcggagccaataacttttcgaaaataatcgaaggaaagagatttgattgcatcatctctgtgccttttactccatgggttccagctgttgcagctgctcataacattccttgtgcaatcctctggattgaagcttgtgcaggtttctcagtttattaccgttactacatgaagacaaactctttccccgatctcgaagatcctaatcaaaaagtggagttaccaggcttaccgtttttagaagtccgagatctcccgacattgatgttaccttctcacggtgctatcttcaatacactaatggcggaattcgtcgaatgcttgaaagatgttaaatgggttttggctaattcattttatgaactcgaatcggttataattgaatcgatgtttgatttaaaacctattatcccaattggtcctcttgtttctccatttcttttgggagctgatgaggacaaaatcttagatgggaaaagcctagatatgtggaaagctgatgattattgtatggagtggcttgacaaacaagttaggtcttcagtttttacatatctttcggaagcatactcaaatcatcagagaatcaagtcgagaccatagcgacagcattaaaaaacagaggagttccatttctatgggtgatacggccaaaggagaaggccgaaaacgttgacgttttggaagatatggttgaagaaggtcaaggagttgttattgaatggggtcaacaagagaagatactatgccatatggcgatctcttgttttgtcactcattgtggatggaactcgacgatcgagacggtggtgagtggtgttccgatggtggcgtatccgacttggtttgatcagccgcttgacgcgagattgcttgttgatgtgtttggaatcggagtacggatgaagaacgatgtcgtcgatggagagcttaaggttgctgaggtggagagatgcattgacgccgtgacaaagggtaccgacgctgcggatatgaggaggagagcggcggagttgaagcaagcgacgagatcggcgatggcgcctggtggatccctcgctcgtaatttggacttgttcatcaacgacatcaaaatcgttaaaaatgatgtaattttaacaccaaaatagtgtttagccttcgaaataccctatagacggactgtgattatctattaaccggaaataaccggatattaaattttgaaattgaaccagatactgctagaaacttcacatttcgaaaaaattataattttacacacaattgcgaaagatttcatcatcttgcatcagagatcttcaactgcgaaaaaactcgagtctccgatgaatctgtaaatccaaatctgttcttcgattcatcaccattctgaaatatcgagttcgtactaaacgaatcactcaccatcaacctcggagcaaccaacgaaccaccggaattaatcgccgtactatcttcttcatgagcctctcgacgattcgtcatcatctgtagctgaagaacatactcaagatcccaaatcacatccctcatactcggtctctcatctccatactctttcaaacatttctcagcaatttccatgaatttcttcaacgaattcgtctcaatttgacctatcaaactcggatctaagatctcatcgattgtaccttttgatttgcagaacatcacccattccgatagattcacttcttcgtgaggaagataaggatctatagctggtctcgcgaacagtacctcgaggaggacgactccgaatgcgtaaacatctgatttctctgttaatttatgtgtttggagatattctggatccaagtaaccgaatgttcctttgatgtttatgctgatattgctttcatcttgattatgaattttcgataatccgaaatctgcgacttttgctatattgtgctcgtctagtaatatgtttgttgatttgacgtctctgtgaatgattgctccttctgagccactactgtggagataatctaaacctctagctgctccaatgcatatctctagtctttgtttccatgttaatgaaggtagattcgagccgtatagatgttctttgagtgtacctttctccataaactcgtagacgaggatcatttcggagttttcttcgcagtatcccgttagcgagacgaggtgtctatgtcggattcttgagaggacttgaatctcggtttgaaactctaagatcccttgtcctgagccggttttgcctcgtttgatagcggctttggttccatcgggaagaatagctttgtaaacgtagccaaacccgcctttcccgatcaacaactgctcgtcgaagttgtttgtagcgcttagaatgtctgtgaagggaatcgttaagcctaagtgtaggttgcgtaatggggagttgtggtattgagagataggtctattgtctgaactcccacctctgtgcaatggcaaaggagaccatacagtgccctcaacctctggcttagtcttcttcgatctcctccgcttcaagaataccataaacagcaaactgaagaccaaagctgatgcagcagcagcagcaacagcacaaccagtgatgatgtgaacccgggaactgcttctatttgaataatcagaaccagatttactcaaaacctccatcatctccagaccattcagaaaaccagcatccttattggcctccttggtacctatactgatattcaagagtccagaaccatcagagacattcacgacatccttaaaaaacggactcgccaacctaggctgctctgaaggctttacatctactcgccaatacccatttacaaagagatagaaatcggagtcggagtttgataagttgctcaaaatatcagaaaaatgaatcctgatgaagtgtctatggttacttttgaccttgaacgaccatgtaacattcatcaacatccccacctgctcattcgagctacggttcattgctttagctgtcttgtagacgaaatcaggagcagtggagtccgtggctgaacttaaccctcccacgtagttaggcgtttgtgttgaattaatgttcctcgctgaatcttttcggtagagaaagtcatcatcgtcaggcagccaagttcgtcccaaggtatcattatccggagtgattttctcgcctcctacgtttaatctgtaaatcgtatgcagattcttatcggaagctgatgggatttcgaggtcatcaggagcagagaacacttcgatggcattgatgagagctaaagaggaatgatcgggcacaaatcgaatttcgaactccagcgagttcatcatcaggagaaactcttcaactcgtggggtattagtgagattctgaggcgagaaacttttcaagtgatgattagaaccagaggtagcagagacagtgaaccgagcagttaaaagatctgcccgagaaaacacaacagagaaatggagacgcacaaagtgcagacccagagaatcaagtttgaacttgtaagaagaagggtgtctaaatatcctaaccgtccggtatatttcaggcgcaacggacgattggtcgttgatgacttcagttcctttgttggtgaaggaaactgagttagtactcgagttggtatctccgacgaaggtctggccaccataaaatacattagaatccgatccacagttgacgtaaaaattctcaggacgggtgtacgtcgaagtatcagaaagactgagacgggggagaagaacaagaaccatgatcgtgataaatagagaaacagagtcttgaaaacagaaattctccatagctttgatgcagagaaggagaaagagagaaagtcaagtctttgaggtcaatggatgaaaaaacatgtgtggtctatgtgaagactggattgaggaagaagatgagattgaaggagaaatagagaattgaaattattggtggaacaaaaagaaagaagactggagttgacttttgaagtcatcgtcttttgtcccgtgagaaacaatcactctctaatctttttacctttggctccccaacactgacctagtaaacggtcagtctatactattagattttttgacatgataagtttttttactacatattttattcccaagtcaaggaaagaagagttacacttcaagcaaaagcatcgagaaacttatggacaatgggacgagctttacacatggctagcaacggtgtcgcaggacgcatcatggccataggttcttctctagtgtctacatattcttcaccaattctctgccattcgaaacactgaaccatcgatccaagagccaagctcattaaccgatgagctaggccaaccccgggacaagctcgtcgtccaaacccaaacgacaacaacttctgattaagcttttcatttttgaacctctctggcttgaacatttctggggcttcccatatagacgggtctctatgcatggaccatacgttcaccaataacatcgacccacgtggaacgtcgtatcctgccaatatgcaatcatctgacgtcatgtgtggaatatttgttggagctaccgggtaaagacgtaaggtctccaacacaatccattggagataaggcagatttttagtatcagcttcatccattaaccggtcaaaaccgacttcggtatcgatttcggtcctcgctttctctaatacttctggatggttcaacaaattaagcatcgcccattctaaagtccctgctaatgtttcagtcccggcaagtatcataacctgtaaacttaaaatcaataataagctatcataaagtttgattagtgttgttacatatagtatatgaattcctcaaacttacaattatgattcctttaagagtgacatctgtatagtaatcaggctgagtttcttggagagaaagcaagtgatccatcatagtgttacccttttgtttatgcacacgtctctcatccaccagactctgcaaaaactcatcgacccgactcgccaactccttgacccctttctcaaaatctgtgatccaacgcaaaatcggtatataatcggctgcattcccaacgccagccctgtacacaatctcgtcaatcagttgtgtcactcgccgcgcaacttcatcttgttctgtcccctctccataaaatcgtttcccagccaccattcgaagaatgttgttgatagtcaaatcataaaacaattgtctcatctcaacctttgcaaaaccctgattttaattataatcacataaacaaatgattaatcctcaaactttcaaaatcatacttcacaatcttcatttggtatagaatatttttggcgtctacaatctacattttgcacatgcacatggccaagtataaacctatataatgaaacagtgacggcactatcacaaatcaataggttataatattttctggctaagtaaaatgttttgatatgtagaagaagctcacatacatgttgcgagttttttgagaggcgcaataacaagtgtcggatctcatctttacggacagataaaaagccgttgagcttgtgtgacgaaaagatctccagggtgccgatacggcgtaggtttcgccaatggtcaccataaggcgcactggtcatagtggtgaagttgtactcaatgtgtttcccgagaatgaactttggcctattggccaaaacaatgtcgttttttgtaaaacattcttcagcgatggagtaggaagagacaacaaccgtgagatggtttccgaggcggagggagaaaatcggggcatcacctagtgattgagagaatgagaggaatgtgcggtgaagcggctgttttaggaggtgaaggtgtccaataaacggaagtggcctagccggacttggtggtaggttaaacttgctatgccgtttaccaaacaaaagtttaagagaaatgaaaaagaggaaggcgagagataaaattaggaaatgggtttccattagatcgaagaacttgtaaatgtgttgaactgaacatgggagttcgaagttatagcttaatttataacgaaagcgagagtttacgtggaacatgatgatgaaaaaaagaagttcaagttttggtgttatcatgggaaatcattatcccacctgtcactaaagatatgtttcgtaacgtctcatgcagctaattacaaataaacatgtgtaataagtcaacattagtatttacaccaaaacgaaaagacatgttgtaaagtcaacactaataagtcaacattagtattacactatatggagattcacggtgtatataacagagtagttagtaacgttatatactaatgttttacaaaaacttatgatccttacttagttagctagagtaggtataatcgaacgttactaatgttgtttcgtatatacaaggagcagaagcgataagagcaaaagattaaaaattgaaaagaaaaaaaaaatatagattgttgtgaattcgagaaaatttggatgaatctaaagagaaatgtaacattcgactattcttaaactatggaagcctcctagtattctaagaagagtaaatattaattttattgtaaacattacccctcttattcaagtattttgtaaaattctaataattattttcatactaaatgtagtacaatagtaatgcataatattcagagcaaattagatctcttagtgactgtaactttaagaccatgcttcatgtgaagaataatagaaggaactggctcgatcttgtgtccttcaacgacctttatctcatagttttgtataattttcacagccactgtcttcatctgtgtcatagccacttctttccccaaacaagtccttggaccggcattaaacgataagaacttaaaagaaggcacgtgaatcaaccttccactctctgaaatccatctctccggtttaaattccgatgcatcttctccccaaactgatttcattctccctaatgagtaaagacagaacacaatcttcgaactcgcatcgactctgtgtccacttggaagaacgtcggattttgtaggagacttgtgctgaaatggaaccggtggatatagcctaagggcttcacacaatgctccatgtacatacaccaacttgtttaactcttgagcattgaatgaatcaaaatcattggttcttggagatagttgtgtgttgatttcttgacgaatcttggttatggcttttgggttcttagagagaagccaaaagaaccaagtgagagcagagcttgtggtgtctctaccagctaacatgaagcttaagatcatgtctctaaggaatttgtcatcacttggattcaacaacttgtacttggttgtatgacaaattgtatccacattcatgtagcacatcaacaaatctttagaagaagagtcaatgtttataaccccattggttatttcatctctcttagaagctatgcatttagagcaaactcggtcgaatgtcgagtgagctttcttcattttcaactcatctccaaacccaataaacctctgcatcttccaaacaatctctggcttcacatgcctgaagaaaattgcttcctctgcttcgtctaaagctctagcaaactcgatttgcggcatttcagtcgagagacaacccgggtcaaccccggtcgctaaaacaaacgaagtgtcgaacgtaaatctttggaacacatcttgtaagtcaacgacttgtttcttttcagcaacgtaatcaagaagtgggacaagccctttctctagcttactcatgattgttcttagtgtaaacctttgaaaatcttgatgagtcatcatgctttgagctgatttcctcagatctttccataactccgaatccgcgttgaaaatcccatctcccaaaacatcgaatatcttcttgaactcggttcctttcgggtaattcgcgaagtttgagctcatgatgtgatggatattagccggatcaacggtgatcaacatgtcaaggcccccaaaacacggacctttgaaaggataagttaagtttgaggcctcgagaagctcggttacaaagtcgtaaacacgagggatctccacgagtaaacccggaagcataccgagaaatggccagttggtgagaaacgaacggtgaggtttcttgctaatcaagaaatatccgtaaaggaaggagaaaaagagtaaagaaattgagacttcaagtaaggttatcagagccattagagaaaattgagaaagtatttcttcttcttcttttggaatacttgattcttgattttgttcctattacatatgtataaattaatacaagggcctgcgtgccatagaaactggtgatgtgtctctgtcgtgtgggtaatgaaattaaatgatacatcttactttttctggttattattgatccatttgttttgttccgtatctagctttgttgaacctaattcggaaaccaatgcaaaaaaaaaaacaataataatttggaaatcaatgcatgtgacaattgataatttcatttagttatttgtcccaatagatatatacaaaggatctagctggtttctgtaaccaagaaaccaaccaaagaaacaaacaataaacttttacttataacatttgtctatcgccgtgcagtccggtcgtctagtcaatgaagagatctgaaagaattggctccacatatcatcaataatttgaagtgtaatacaaaagtgagcaatgcaaagaaaaatcttcaaaacgtttggtactgccagtatttttttatcaattagctaaggagatgtgttggataactagaactactttcgtgaatattaagcaactgagtttgcaagggttttgaaaactttttatcgcatgattgctttgatcttttttttttttttttttttcaaaagaaaaaaaaaatgattgctttgatctccactctgtgattgaaccttgacacggtgtctctaacaagttcccggacttgttaccaatcaatcaaaagcttacactatgttttaccggtgcgttctttatgttatatctgaaagcaaaagaggatacaatgaacataataagaaaaatcaaaggaacactctctaaacgaagactcgaacttttctatatctagccaatatccttctttttcttgatctctctatctctctcggaactatatacagtataacacgtcaaacctgaggaaaaaaaaaaagccttttagcagaagacaaaaacttaaaaacagaaaacgcaattaaaaccaaccgtaacaggcctattcaacttgagcccagtgtgtcatattaacctattttaggcccaggtaaaaacatggttgaggcccatctctcacagatttcatgttgttcttatattatcataagaaaaacatgttttctttaacgtttcattttgtttgacgtttgattcaattttatcacctttttgctcagactagagaaaaaaaaaagaacttatatatttttcgataaagaaaaccaatatatcttattcctctatttttgtttttttttaatgtgtttggtttcatttttaacctaagatagagtctacaaagatttgcttgagacatagggatcaaagactttgaccaaaaaaaaagaatggaacaagtaagtaagatatttcataaaattttaagtaagaaaaacaaaaagatagagacaaaacctagaatagagaataaagaagtgaaagaaaaagtgataggcatcatgcaagaagaaggaacatactaattgcgtttttgaattcaaagctaaagctacgactctgtgtcccctttccaaccatagccatgtgacgtttcgatgaacttcacttaaaaatagttatccctctatcttttgtttttatgtctcgtctatattgtattgcaatagttagaacctaaatggtgacagaatcaacacataacaaatggatcgttagttactgtttcctttaatcaccaaaaagaaaaagaaaaacgaaacggatcgggctgaataagtattgttagattgaaacgattcgctcataaatgttgaatggtgattacaataaactcgatgaagatataaaatttgctagtttttctaatacttaaaaatactctgaaatcaaaatacacaaaattatagatcaaatattactctcactgggagttgaattgttgaaactgatcagaagtcagaagaatgagtacattaaacacacatgtgtaaaacataaacacacgtgtagaataagaagtgaccaaaaaataattgagcattgaactaagacgtctctgataaatagtagagacacatcattgtttttgggtcatttcctcccgacaacgaaaacgactgaacaaaaatgttttatactgctccagccaaattcagccctaacattcaccgaactcattcaacttttattattgtactacttgttatatatatcgtatacatacacagtaatttcaaatatttcgatttcatctttttttaactttatttcgatttagctcataatactaattttatcaacaaaaaaaagatggtggttttttaatctacatttaataaccctacacatacgccgaattacaatgaaatacagaaataggtacataaccacaacattagcttaaattaataaaccaaaaatcttagtcagtttgatgttggtttaccaaaaaaagcatttttttttcaaagtttactaattttgttttaatgtttgagtgaatgaatcccatttttcttctgcacatggtagtttatcatattttgcatgcaatacaaaaactttatttgaatgaaaaatacgaaatgtaatagccaaacatcacttgctgaaaaaataaaaagagaaaaaataaagcaccaacaaaaataatgctacggatcgtcgtttgtaaactataatttttcaaatgaaatctataagtattcgtcatttaatcatagattgaattttgaatatagattccatgtcacggacggattgaaatatgtcccctcgtattaaataatacggattaaattaaatttttaaacgattagattaaacctaccaccatgcttttcaatgttaggacttttcgtggatagacaagaattattaatcaatacacagacttgagccaaccttatctgaaagtggtttcgtatacgtatttgcgaaatgctactgtgtaaagttagggatacgtataataagacgaacaagcatgtcgtggtcctcgtttaaatgagaatctctactgtttttagtaaattatgtagagaaataaatcacatcttcaagttgttgtagccaactgattttgttctattggacaaagcgataatcaaaccgaataaagagcatacaaattttgtatagaaaacaaatcaatcactaaatccacatatgttgtagaagaaatgggtaaaatatttttaaggaagttcgagtaatataagggatagcaaaatctagttattgtcagacaatttttttgagttataatttgtaacattttagtatgttgcaagttatgttttcaaaattgctcaaatatctaaccaactaatctaacgtttagacatcgaaaacattgagttaccgattccgaatcattgtgttaaaactttggcagatcaaagccttaaaacattatttatttaatagaattgtcttaagaacagtaatgggtgtttaatctctactgtttattattccaatttattttaacagtttaaaaaggaaaattaaaatcaaataattcattccatgctaatatacgtacacgacatgttttctttttcgtttatacatagccaacttgactagtggctgatggataatttggccacctccataaaaagaaaaagaaaacgaaaaagaggaaacagacacattatacaaagatgtttttacacacgatctatgtttttgtttattaatacaaaccctcataaaagtttcttttcgttaaaatagacacatattaaagtatctttttcgtgaatacgaacatacaataaattattggtttatcaatgcaatgccagattatatatatataacaatttaaataaaaacagtactgaagtatatttttgtcccacaattttggttttttggttaacattgacaaaagtacacataaacgtcagagaattttttgtagtccattggttagtgatttacggttctctataattagagttcgacttaacaaaaaaacaaaaaatattaagggttctagtttgtttgttgtgacattgataatgcttagtcatgtatacgaattaaacgaaaattgtgttcggttatatcaaaaaccccgatgattactttcgaattatttgttaaattcccggttatctaaaatatatcacatcaaagattttatttatctaacacaagctcacatgtcgtcgaaaataaaagcacaagcacacgtcaaagttcacatccaaataaaaaggagaacggtaatggaaagacaaaggtaaagaaagaacaaagacagtgtttgcctataaagtcatcatgctttgtcttttctattacaatgcttagtcttttttctgcgtatgccaagctaaataagattaatcttcaattttaaagattcccgaaaatcctaattattttaattaaaattatcctcaatttggaaattcttagtggcaaatcaatgcaaagtgtgtatatatttctgtgtgtttgtaggaccgatgataaaatagatacttaggaatatcaataactaggactaattgtttcttttgtaaataaagatgtacatgtctatagactaggacggaggtctatctttaaatttagtaagatgtcgaaatgtatgtttcacgatcttttatacggaatctttcacaaaaattctatcgttcgttgttttcctaaaatttccggaaacaatagagcatgtaatttttaacttaaaacgaaaaattgtgtaagaactaaaacattttaacaactttaaaggagcttggtgcaaaaaaaaaaaaaaaacttgaaaggatgaatttcattcaaatacatttaaaaggaatgttaataagggagttctacaatatttttgcaccaaaataaaataagggagttctaaaatattttctttatttcaaattgacagatttaagataattaatttacgttgtcttgcgcatggagatatcaacagtggtcttaaagactattattgacaacaagtcaacaaacattaaacgtgcacctgtctactaactactaataataataatgttaatgacaaaaagataattacaacatccaatcttcgaattatttagaagaaacatcactttgaacttttgaagtatataaagaaaataatgctcttttatctttctttaatttcttgatatttaaatattataatcaaataacaattgcggatgttaattgtataatactctcctccaaactagcaggcacttagtcaagatttcttaatgttatttaatcgcatggttgagaaaaaataaataataataataataataatatacagctatagaattattgtttatctagaaaacaatttttgggttaaacattcggttaacttgggtatgaaatggtatatatattgttttagcattttgaatcaatataaagaaaacataattctacgtatccaaattctctctcaaaatcttcgaccgaattaacgcaaaccttgaaccattcatcatttccctatgaatgtaatcaaaacagcaatggagttaattttgtactatttattaaaaagttatggaacatacttgaattgcttaagattctaaagaaaatatctgtcggattatagtggccattctttcttttcttttatttttgcaataattagtggccatgccttttccatgcttgatattgaaagttgattcacaactcgtaaaatatatctctccgaacgcagcttcgtctttgaattttgaaatagtttcttctaatcaacaaaacaaaaaaacttttatagataatttggttttagttttacataataccatttaacatcgagtaatgagctcaattagacaaagataatatactgtattatttagaccaagaaaattagtaacgaatttctaacctattcaagtaaaataacagacaagtgggaggaaataactatttcaattaacgtatgcaatactaaggaatagtggtatttaattattaaaaagaagaagaaagaatagtgatatggacatactagaaaattgttgaaatggtccaagtgttcccctaaatgtctaatcaaagataaggcatgacccgtgcgaccagtcacttcctcaatttgttttctttctctcattaggtcatattcatatgcataccgtctttttatcaattacatattcaataattattgttttaggtcgtatattctctttttctattagtattatgtataccagtaatcttatttagtctttattttaaggcttacatgtcaactgatcgccatgactgaatattatcttcggatacctccaagatatcaaataatataatatttgaataatattaatatcataattctgatttttttgtatataaagcaaaaggatacaaatgtatatgcttttcatattttcatctatgtgatgtatattattgatttttcttaccaagataccaccgtattaatttttatatcttattatttattactggtatcgtaagaccaatctctttaacacatcgccaaaaaaaatgtataagagctacattatcagttggcttggattttccttttttctgccttcatcactttgcgcgttaattccttctataatcgtcctcaaatatttttaaattgctatgtgctgaatattttaaattttcataaactttaaagcaacctaataattttctatttctttcaatatatttattgtttttcctatttaccaatttaaataaaatataattttaatacataatatacattaaaaattgaacctcttgctctttcagaagaaaaaaaacaaaaagcaaaaaccctagaattaaatagtactgtcaagttggagtgggtacaggcacgatcgagcaaaacgaaatgtcccatgcatgcctttaattgctttagagttagttcttccaaatcaagaattagttttagttatcaataaataggagtacccactagtagtcgtaccacgacctttcaattcataggacaaacgtcttaccccctgcattattatgcgatatatatgtgaatcatacatcatacatggtgcctaaagaaaatgtgaatcatacatatgaatcttaattattccatacatttaaattatgaaatgcataaaaatgttttcgaaaatgattttataaacatatacgcagaatctcaaagttgctaattgtatactattgctttggtttggttgttaggctaacgtcccatgatccttcggaaagataaatatgcatgacccggagtgatggagcatctaaaattttatggaagctttgctcttaaaaagattaagctgtaattgtataagtatatatagttttaaccaacttgtggttatttttgtagtcgtcgaaatatttattatgggattggaagatcatggtggattgatatgtgtgtcttttctatatatttttaatatttaggtcccattaaatcagtttgtgatttcagaatcctaacatacccttttgagattacttttcctatttatctcgaacataacctcattctaaaactacaacactctattgggacaattctatttggatcaaatttgtgctatagtcatgaatttattactcaaaattaactaaaaagaaatgaacgacacatattttaaatgttttctaggtttaatatcaacttcagatgtggaatattccaaacatgttcgagtttttctattgcaatttcaataataattgatcattgtggacgttttaaatcactagaacattttggcctctcacatgtttcatgattagtctttattttatatacagaattccggattatgagagaaaaaaacacatacttttattaataattacaaatttaaattgaaaatttatttttatgttattacatccaatgaactaatgtcaatgcatggaaagaattacttaggctccgggaacaacaacatgatcccttcacacacatactctaattcaactaaccaagtcttcttaattctgataagtcaaattgaaaatgtcattaccactgattaaaaaggaatcaaaagaaaaaaagcttttagtattgagtattgaccgtcgctatcggtgacaggcagagtcacaagccaaataaaagggaaccgcgtggtacgtacgggctgacgcctagctgctacggtcatgacaataaattgcccaatcaaagtaacatgccaacgtggcgcagacatatcagtcccacatgtctgcccaaaactagccaaagattacgtgaccgcggtccctcttgtcccctgtctcggtctaacgataacaaaccgagcccacttttatgtcgacgtggaatttggctgacgttggttttctccttcttgccactataaatacaaccccatactcgtcgagtttcaatatctcctcatcatcaaacacaaagtctaatattatcacttacaaataccattttaatcatgaccgttgattcagctctgcgatctccgatgatgcactcaccgtccactaaggacgtgaaggctctaaggttcattgaggagatgacacgtaacgtcgatttcgttcagaagaaagtgattagagagatacttagtcgtaactcggacactgagtacctgaaacggtttggtctcaagggattcactgaccgtaaaacatttaagaccaaagttccggtggttatctacgatgatcttaaaccggagattcaacgtattgccaatggtgaccggtcaatgatcttgtcttcttaccccatcacagagttcctcacaaggtatatacttaacccaaaatgtatattatgttatcttagactcttagacagagttaatcatctataattgtggattaatcttgttttgtatccagctctgggacatcagctggtgaaaggaagttgatgccaaccattgatgaagacatggaccgacgtcagcttttatacagtcttctcatgcctgtgatgaatctgtaagttacagttatttaatttgcaattaacttctattttgtagtaatatctacgtgccaagattaatacgttaaaattggaaaaattatgaattaatctaatttatattaaaattttagcaaaaatattttaaatctgaactttggactctacattctaaatttaaaacgtgaagactaaatgctgaggtttaaaccataaatcagaaaccttaaaccctaattcttgaaatttaaaaaattaacactaaaatataaaccaaatcatatatatttacttaatttcaaaagatctaattaacatgtgttttgctttagttcatattttgtcagattttttttgtcaattacgtacatcctttaaaatgttatttcactatcgcaataacgtaacattttttttttcttttttgatagctagccttggattaattacctaaataattaaaaagatgatcttacaataactaatagttttttcttttcttgttacagctacgtgcccggattagacaaaggcaaggctctatattttttgttcgtgaagacggaatcgaagactcccggtggattaccagcacgtccggtgctcacgagttattacaaaagcgaacaattcaagagacgtcctaacgatccgtacaacgtgtacacgagccctaacgaagccatcctttgtccagactcatcccaaagcatgtacacgcagatgctttgtggtctccttatgcgtcacgaagtcctccgtctcggcgccgtcttcgcttctggtctcctccgtgccattggattccttcaaaccaattggaaagaactcgccgacgatatctccaccggtaccttaagttcaagaatctctgacccggccattaaagagagcatgtccaagatcttgaccaaaccggaccaagaactggctgatttcataacttcggtatgtggtcaagacaatagttgggaaggtattattactaagatttggcctaacactaagtaccttgacgtcatcgttactggagccatggctcagtatatcccgatgcttgagtactatagcggcgggttaccgatggcttgcacgatgtatgcatcgtccgagagttactttgggatcaacttgaaaccaatgtgtaaaccttctgaggtttcttataccattatgccaaacatggcatacttcgagtttctccctcatcatgaagtcccaaccgaaaaatccgaacttgtggagctagctgatgtcgaggtcgggaaagagtacgagcttgtgatcacaacctatgctgggcttaaccgttatagagttggtgatattcttcaggtgactggattctacaattccgctccacagttcaagtttgtgcggaggaagaacgttttgcttagcattgagtcggataaaaccgatgaagctgagctccaaagcgcggttgagaacgcatcgctcttacttggagagcaaggaactcgtgttatcgagtacacgagctatgcagagacgaagactatacctggccattatgtcatttactgggagcttctagtgaaggatcaaaccaatcctccaaatgacgaagtcatggctcggtgctgcttggaaatggaggagtcgttgaactctgtgtatagacaaagtcgggttgcggataagtcgataggaccactcgagatacgtgttgtgaagaatggaacgttcgaggagctcatggactatgccatctccagaggcgcatcgatcaatcagtacaaggtgccgaggtgtgtgagtttcacgccaataatggagcttcttgactcaagggttgtatctacacacttcagcccagctttgccacattggtcaccagaacgtcgtcgttgagaagattttggtttgtgttaggatttgtgagtcgtacaataagttcggtgtacggatgtttaccccatcaatgttttttccactctgtccctcctttgtctgatttctaattaataaacaatttaagttatttagccgaaaaacataaaaacaggaaacaaagttgtacacgatctttgattcaaaccgaagataaacgaatcctcaccaattggaaacgaagcaaatgtactaagcgtcgatgttaatgacgaacacttgatttgaaataaaacttactttattaaaatattcaaaacgaaaagagcataaacgaatagatatctaatgttgaccaaaagaattaaacgcagaaataaagacatgcacattgctttcacctaagaccaaccatcgtctccatcttcttcttcatattcttcttcatattctgaatcttctgtcttctcaaatggagcattggatggcttgagtatttttaaatccttaacattaagatcttctacgtcgtctacaaaggtgtaaacgctacaaacgccttcaccaaaaccttggatttcaacacgttggagagtgctcttttcgggattgaagtagaaaacataaaatggttgtccaggagtatactcacacatcgaaaagactatgtcaccccaagcagcagtcgttggagcaacggaaacctcacgacgacgaaagaatatatcatcggtccaagtgtaggcatatttctaccattcctgtttctctacatcctctagaacccacacattcaacttattaatggcatcaggttctacataattcttcttacgataaagacacgattgatagttgacatcatcctcgaaataaattaccgctaatttacccttatagtttatcaatctacaaaacctttctatctcaaaaaaaatgaatttttcagacctaatatcaaagcaaactatcgcataatcatactttaaatcataatctttattatcccaagcggacgtttcgcctaagtaatacaataccccattaatggataccccttcactcacaatttcatatctcaaggaacatcttatggttctccacttcatatttccagttcctactgtaaggattttatgatcacgatcaccagatagataagccatgaacaatatcttgaattgcttctcaatcggttcaaacaccaaaaagctatacgtctttctgtaacgttgcaaataaggtaagattgcatactctcctgtgtaggggttacatatcacagatctatcgtcggacgaatcaccatataaatagatcaaaccagaggtgtaaccatatgaaaaatatcgtcgatcactattatgaccgatgcgcatattgtttggagggaacttcacatgaaatttggctgatgctgctacagaagccgacgaggacttttcatatggatactgaggcaacgagaagaagctccacacaccgtctgctaccgtggcgaataagatgcacggcttaggcgatgacctggtcaagaacaactccgtgaaatatggacgacgtatcattgatgcccatggcttcgacacacaacgaaacctggcgactgactttgaaggcactctcgacaatatctcagcgatgagatcaatcgatatgggagatgatgaattcatgattttgcgatcgaacgaagaaatagatttgttgaaaacttatgtattaagacctagagaaaccctagctagctatatattttcgattatagtcggttaagaaaaagaaatatggcctaatttaacgtccgagccggtcaattgctatatgagattatgaatttcggtttgttgtggtttacttgtaaagttctggtttgttacggtttagacaattaattgttcataacaagctctactattattccatgtacaatcgatcttgattatctctctgttcaatatatgttacgtggatataaaagatacgttaatcttagcgaatttgcatagtctgcatttttttcagcaactgataattatagaatttccattaggcatagagtagaaaaaacatctcatgaataatgtcttcgagaggttgaatgtctcgtaatagagctcatgaatgtttttaggacaaagctttaaacacatcgaattcattttaattttaatcaacaaaaaaaggaaaacaaaaaacaagtgcctatcagaatcatgactcgatcatatgtgacaagtctctgatttggataatatcaagaggcagatcctgaatgttgagattgatggtcttgcttgctgcttcctttcctgatagattttgagagacctactggtaaagtagctggatcagagactctgtgtaattgaaattaatgagatatttctaaagtagttttttttaaaagtacttgtatatgacaagcgagttaaaatccccaattaccaatcatccataatatcaacagtaaatttaccacgggctatgggtttagggccactatatttttaagtgtttctgggggccaaatattttgtcaattctaatatgtttaggccacaatattttaaaagcctgttattgttttttcaaaattaaaaagtgtttttcagaggggccatattaaacatgttttggttcgtgcgtggatacatgctttttcatagcttttgattccgatttttgaaacacaaagcgaacctcagacgaagtttctatataatctaattctacatacatggttacacatatcatgttatgttttttgtcaaattattttaaagttaaactgagtctgaattgatgtatatacatcttcacggatgattcgacaatgtgatgtttcctatgtccattatactccatatacatcgtacatacatcttcacggataaatatcaaatttatttgcttcttcaagcaagcgtatatgttttttcatacttccaaaagtgttcttgttttttagtaaatggagttttacgtttttagagattcatatttcttctgcgctgaaaagtgaaacataagataggataatatcttcgcgcagcctgggaaatgtagattgctctttgaaagttgtgccatctgtttttcttttggtcgtctgccattcattctaaataaagcccattacatatacatgtatttattcaaaaaaaaaaatactcaaaatggtccgtaaaaatagagaaaaaaatacgaacaactatgtcaactaaatatttcgagagaaaaaattatgttgttatcattttccaaaaaaaaataacccggaaacatcaacaaataaaatgagcagacttctttaaaatgagatgataaacacgtaataatcttttagaatttgtttttttgaatttaatgcaaaattatattcaaaagaaaaaaatactgtttggtacatagaaatgcatacttttttatggaaatcaagtaaagattatctatccttgactttttaatttttatctttgatttctacttgttgtttaatatagtgaacctatataaaagtttgcgttgtttagaattctgatgaattggtaaagataacaaactacacgggcatgttcacctcttttcacaatgcattttgatgagcatgcaaacattaactatacatatctatatatacatttttgcagccattttgtgaaataaatcttgtagttgaaacttatttacaatggttgccactggattttaatatttgtttttgataattagaaaaaaaaatttcgaattaaatatttgatatttaacaatttccctaaaatctctctacattaactacacgattggttactaaaataaaactttcaaaatatttaatatcatttaattactacaaaattatcattattgatattgtttttctgcatgactattacaattcaattataatcatcaaaccgtagagatatttgatagcatttaattactagataattttaaaaataaatgattcataaacatatgataaataagatcaacattaataaaataaaacgggacgggttggcggaacgggtttggcaggacgttacttaataacaattcttaactagaaaataaaaatattttatagatagttacatagatagttacaaattgtaaacttttatatatactaattttaaagtataaattgtctccgcggtataccgcgggtgaaaatctagtatatacatattttaataagatatcttttattatcatttaatgaaaacattaaatatgtacttgttttttgtttctcttataattcaggtactttgaacaattaaatagataatttagcacaaaaggtatactatatccatataacattatatttgtaatctatgtgccatccatttctaaactttgtaactttaacatagttgttgacaatagaagttgcactaaaagattgttttttataattatgtgtaaagaataatttacaaaaaattggtgaaaggatggatatcttttgcaaatttaccaagaaaaaaaaaagaagagaatatcggaggtgagagacgtgtatccacgagccaaccatgtttaatatcaggcttggttcccactattgcatgacatggcatcatccccatggttctttcgatctcgccaggtcatcaacctaagtggaccatttatttcgcatgatacacaccacctgtttatttctttatttgcttttttattccctatacatgctttttgattttgatatatactgttcgaggaaacaatactcctaaatagtatagaaatattttaagaagacagaaatataaataattatattaaaaatcttaacattagttacaatatattaataaattcaacaaacagtttatatatagtttattcatgtttgaagcaaaacaaagtttaaaaacaaatattttcgcatgttactttatcacaaaaaatgatctaattatactaaaaatgataaatttatcgaatctatttaatattttgaaaaggattctatttacactatacatatctatggactacgatagacatttttatttttaacacacgaggccacaaacgaaggtatacgtgatgcatgaacactgtgaagtgtgaagcttcctatataatctacatgttgatgaacgctcgataaaattataaacctaattattagtccaaagaaattctacaaaaattctctatttaaaaaaaaaaagatagtgaaaaaatgtgtccgtaagtaaataagcgaattaaatgtaaaatctgtcccagaaaaacaaacaaaactaaactagaaaagagaaatttgaatttacttttccaaattccatttacacatcaaaattttatttatttgtttatgagtgattatccgaattacctccaccaaataaaaccctatcttatttccccctaaattattagaaaaatataaagtgattaagattcttttgaaagtttgtgtttatactttatcttgtactaagagaaacagaacttccctataaaaagcaaaagcaagtaagaataacgtgttaaactaaaacctcgaaaacaacaaaacccgaaactgaaacagagaatccaaaaaaaatgccacaactcgagaacaacgagccacttctaatcaacgaggaagaagaagaagaaacagcgtacgatgaaacagagaaggtacatatcgtaagaaacgaagaggaggacgatctagaacacggcgtcggatgcggcggcgcaccaccgttctcatggaagaagctatggttattcaccggacctgggtttttaatgagcattgcgtttttagatccagggaatctcgaaggagatcttcaagccggtgcggttgctgggtactctttgttatggcttctcatgtgggcaacagcaatgggtcttttggttcagcttttgtcggctaggcttggtgttgcgacaggtcgtcacttagctgagctttgtcgtgatgagtatcctacttgggcaagaatggttttgtgggttatggctgaattggctttgattggatctgatattcaagaagttattggtagtgctattgctatcaagattttgagtaatgggattttgcctctttgggctggtgttgttattactgctcttgattggtaaattctcaatttttagacatgtgtcttcttgtgttattgtttcatttgtctgtgtttggtcccagttttgtctttttggtttatggttctaatagcagtttagctaatctaatctatggattgtttgaatttggtgttagttaaccattagctgtgttaatttcatctttacacatgaatttttgtcactatgtgctcatttggtcattgattcatatgtgtgttttgctcaaagttttggtctttttgttggaatcaggaaactctagtgagtgtttatggttctaattgtaatttagctaatctattctatggattgctcaaattattatgtgttaattgattagctgtgttaatgtctcgtggaatttcatctttcggtgtgagtttttggtgttatgtatctcattgattcatatgtatgtgttttggtcacagtttcgtcttcttgtttcttgagaactacggaataaggaagctcgaggctgtgtttgcagttcttatcgctacaatgggagtctcattcgcttggatgtttggtcaagctaagccaagtggctctgagcttctcattggttaggctttctttcttctctttatcattttcttaatggaacagtcttttaactttttaagttctgaagaagttagatttctcttgttgcagggattttggtaccgaaactgagttcaagaacgatacagaaagcagttggagttgtgggttgcattataatgccacacaatgtgtttcttcactcagctcttgttcaatctagagaagtcgataaacgacagaaataccgagtccaagaagcgctaaactactacacaatagaatccacaattgctcttttcatctcctttttgatcaatctgtttgtcacaactgttttcgccaaagggttttataatactgacctcgccaatagcatcggtttggttaacgcgggacagtatcttcaggagaaatatggaggcggtgtgttcccgatactatacatttgggcgatcgggctattagctgctggccaaagcagcactattaccggtacatatgcgggacagttcataatgggcgggtttcttaatttcaaaatgaagaaatggttgagagctttgatcacacgaagctgcgctatcattccaactattatcgttgcgctagtgtttgattcatcggaagctacactcgatgtcttaaacgagtggcttaacgtgcttcagtccattcaaatcccctttgcactcattcccttactttgtttggtctccaaggaacaaatcatgggtagcttcaagattggtcctttgtacaaggtttgtcaatttcgttcaaactcttttactaacattctttaaagatcgctttattaagctcgatctcaccttgttgtgcagacaatcgcgtggcttgttgctgcgctcgtgataatgatcaacggttatcttttgttggagttcttctccaatgaggttagtggcatagtctataccggttttgtgacactgttcacagcttcttatggtgcattcatcctctacctcattgctcgtggcatcactttcactccttggccgttcaaagcggagtctagtcattgagactggaccaaacaagacagtgtaagcgtagtagctatgtcttgtaatccttaggatcatgagttcttagctttctctcttgtattatatgtgttgttgttataaagcagctctggttttgttgaagaaggctcttctatgtatcagtagttaggtcccagagacgagaattaataagaatatgttcacatctaaaccaatgttgacacagatcaaaagaaactttggggaacattcccaaaagtgtacatttaatcgtccgatcagagtttcacagtttcaaggattctcaaatactttaaagtacatattgtggatatagtcagggcaaattcgatacacaaggtaaaatgatggaaccaaaatttccatagataaacacaaaatctacttgttctaatatggtatattattaagggctttgtcccgatctattacattggcatctatgtttttgttaatgtattttgggaagtgcagtcttgctcatcttggcattcattgcctctttgtcttccctcttgtttggagtggtttgttttgggtacaaaccaacgtcccacatttgaagtttagaaaatagtttcccatatataagcaagttcaacttcaactagtaagagacattttgggaaggagatcaataacaaatccttgcggatttgagcatgtagattcaaaaaggacaatattatactaaaggggagttggaatgggcttggaaagcctaataaatggtgttgaacgtgggttgaaaaaaatggacctagggcttggactgtataatcggtgtgggagaagcctaccatgtaacacgataagaaggatacctcaagagaacctcacaaataagaaggtgtcgagtcatggtcccaaggtttctctgaaggggacgcccatgttcgtggtccttggtttgaaggggagattgttgggtacaaaccaacgtcccacatctgaagtttagaaaataagtttctaatatataagccaagtccaactccaactagtaagagatcttttgggaaggatcccaataacaaatccttgcaggtttgagcatgtagacccaaagaaaacaatatcatagtaaatgggagttgaaatgggcttgggaagcccaatagtttgcggattgcactggatgcagtctctcatgaagtcattgggatcgacttgtttcaatctcgcttagcttcctttgtgttgtatcttgcatttatccctagtttatcttcttttgaaatattgttaggcatttcttgccttgttaccttatattttccctttatttggattgtatttgctcctcttttgactgagtctgagacttaatttgaatgaaaattatggaccaaacaaaacacacaaaatctactaagataagtgaggtgaattagccaagagataaatccatagatattggcatgttttatgtatatatatatatatgtctgattacatatatggaagaacaaatattacttaggggattttggaaaaatgtattttgatacaaacttatcttacagtataaccgtttatatgttcaaatatttataatattataaacgttttcttaattttaaatatatgaattataatgtttataactctttaaaaccttagaaatggagatggtacatatcctaaaaatctttacatcaatcgaattttcagacaatcatggcctttatggcctttcatttgaaaaaacttgtttatatgtatttgaactatattatgtgggaatgtttattaacaaaccattgtgagtttatatcaacaatttattttgtaaaagtaaatatataaaatgtgtttattaatgtaaaacttaatacattgacaaaagagtaaaagttaataaaatctaagcaaacgcaaaatatcaaatctaagagccttttaaatttctttcaatcatatttatattaaaacaaaataactttataaaaattatttctccgtatatcgccagttttaatctagttattaatcaattaatccatcaaattaaatgagtttatgggttgacccatcaaataagttgagtcaacccataaactcatttactaattttttggtattctacctatctagaatatgtaaaattaaaatcatgtttattctgcattttatatgaacgagctccaaataagtgtaatttatatttcatgataataataaattttaaaacatttacatcatattcagattcaaaagaaagtattctaaatccaccaacagtaacaaaaaaattatgcgattataaattttcattcaatagattcattgaagaacataagatatattattatagttaagacatacatgattaacacaatttatgctctcttaagggctaggaggctttcctatggggctccatttatactctaatttaggaatttctttaccatgtgtgaagtaaataccatcttctctagcttcccaaatattctttttaccgtagtgagctatcagaccgccacttttatatgccctaaaatttgcataaaacttgtaagtaggaccacgtccctgccataactcacaatcaaatttagttttcaaaacactatcatgaaaacgaaattcgtagatttgtactccaggtctcaaatagtggtagcctaggtcgtcgtcttttgatgtacaatgaatcttgagaacgtttttcacaccaagagaatttttaaaaactacagaatttttttctctgaacttcgcattactcgatcctgcacataacacaataataataaaagaaaacgaaaaacaattcattgtttcttagatttacttgttcttttgttttaggggctatatatatataagataaaagatgtttagaaaaaaaaagaagaagaagataaaagatgatattttggtgctattttgggaaaactcattcaacgttcaacttttacgaggtgtatgtttcttaaattgacttgaattctaattgagacaaaaaaactgaaaaagagatatgtttcttaaattgacttgaattctaattcagacaaaaaaagagatatgtttcttaaattatgtttcttaattgacaggttgtacagttgattcttcagttagaatttcttccattaattggcaaattattgtttttgtggacgataagatttattgtaaagacctgatggctttttaatgatgttttacattataaggattattgtggcaaggcaatcatacaagatttgtgactcatcaagctcgggtgacaatgatagtataagaaaaggaagggttaaagacgtaatcttgaaaaatctgattcgtccaaactgcttaatagagccccttctaaataacaaggtcacgcgaaacaagagatacctaaatcagctgatgattctgatgctacaagaaggttttcaatgtcaatgaggccctgtttgtttcatcatttccattcagatgatcgacttacatgattcatttaaatcatacatttgaatgatgtttgtttcattatttgcaatttaatctacatgatgcatttaaatggatctttatttgtttgatcattttgtagttcatccacattctcgtttagataaaaatgttcatgctttcattttgacaaataacaattattcaacatcattacccattatcaatactaaacatattggcgggaaaatatgattttatgattttgctgagaatacacgattttacggttttggcgataaaatacgattttgcgatgttggcgggaaaacatgagtttggggttttggcgagaaaacatgattttacggatttgcgaaaacatgatttatggttttggcgggaaaacatgattttacgattttgacgggaaaaacatgattttgcggttttggtgggaaaaacatgattttgcggttttggcgggaaaaccatgattttgcggttttggcgggaaaacattattttgcggttttggcggaaaatccatgattttgcggttttggtgggaaaaacattattttgcggttttggcgggaaacatgattttacgtttttggcaaaaaaatgattttgtggttttggcgggaaaatatgattttgcggtttttcttgtttcaatatgtaattttaaaaatattaattaagaaatctatagaaaataacatgatttaatttatgattataaataagggtatatctgtcttttgttatttttgaataaaccatcttcatccaaatgcttcaatcaaattcatctaaatgaatttcataaatttgtctaaatttagaaactcattcagatgtatcatccagatgatccatccaaatacttgttaaattataaaaaacaaacatcatttttcatctgcatttggatgaatcatttggatgaaaaacaaacaaggtctgagtctgatttcacagtttccaaaagagatataagaaggttcgtttcaacttaatcggaaggacacatgtaaagagctatgcaattcaacggtaaagttcatgttgagattgtacgtacgacagtttgaatcatttatcaaataaactttttgcttgaatctgagagttaattgtcttaagtgagctgtggtactatcttttatttttatagtttgccgagaaaatgttgtctttttataacttgggggctctgaaggattagctcggattaaaagagctaaacgatgtctttttttccgtttgttggattactaaatgttgctgtgagtggtcatactacttttgtttaaagtttttttttttttttgtttcttaaaataaaaaacgccctatttaaacttaaaactactactttgatcacacgaaattgagttatcattccaactgttaatgttactctagtgtttgattcattggaagctacactcgatgtcttaaacgagtggcttaacgtgcttagtccattcaaatcccatttgcactgattccattattgtgtttggtctccaaggaacaaatcatggtagcttcatgatcgttcctttgtacaaggtttgtcgatttctttcaaactcttttactacattcgttaaagatcgctttataattaagctcgattcacctagttgtgcaaacaatcgcgtggcttgttgctgcgctcgtaataatgatcaacggttatctattgttggagttcttctccaatgaggtcatggcatagtctataccggtttttgtgactgtgttcacagcttcgtatggtgcattcatcatctatctcattgctcgtggcatgatcactttcactccttggcgatttaaagcggagtctagtcattgagagtgggccaaacaaaatagtgtagtagctatgtcttgtaatccttaggatcatgagttctagctttctcttttgtattatatgtgttgttgttataaagcagctctagttttgttgaagaaggctcttctatgtatcagtagataggtcctggagataataattaataagatctttcatcatttgctaatgatgtttgttgtaatggatttaacttaataataataactagttttgtcccaaaaacaaaaaaaaaacttaataactagattatagcctatgctattaatgttttttttttaaattcgaaactataatatatttaaaagaaaaaaaaacagcttcacgatgtataacacaatatatgataacacatctcaaatttagagatgtatagccaacaacatgaactatcttaatcgattataaaattttattcaatagatttattcaagaacataagatataaaattgtagttaaacctagatgattaatacattatttgctctcatagggggctctccactctcatagagggatccccggggatccatttatactctaatttaggtgtttctttaccatgtgtgaagtaaataccatcttctctagcatcccaaaagttctttttaccgtagtgaactatcagacctccacctttatatgccctaaatcttgcataaaagttgtaattataataactacttccttgctttaactcacaatcaaatatagttttcaagacactatcatgaaaactgaatgcgtaagtttgtccatgtctcaggtaaacgtagtcggtgtcgtcgtgttctgatgtacaatgaatcctgagaagttttttcggaccaagagaactcttaaaaattacggagtttttttcgttgaatttcgcattattcaatcctgcacataatataataacaaggaaaaaataagaaaaacaattcattgtgaacttttttttaagatttatttgttctttagttttaggggtgatatatatataaagataaaagatgcttatttatacaaagtgttttgctcatgctttaattttcttcctgttttggcatcttattaaaggaatattttgtttcaataatatttggtgctgttctggaaaaaagctcattcaacgttcaacttttacatttaagggacatactggattagtaatttgggatgatttattccataaaaacaatctcaccttactggactggtcatcattttctgaaatgttttaaaatccagtctcattgaaatctagtatttatcaaaacattccaaatctgtggttattcagttgataatttataaaattttcaaatctcatgttattggaaaactgggattttatcgtaagattttagtaaaaagtttcatatgatttgagagacaatttatagttaaaaagtgtgggtagaacaatcaaacattctataataataaaaaaagaacaatcacacctcatatatgattatatttatatactcaccttgttatatttctatgatctaacaatatagaagaagtcaataatcaaataacgtagacaaaacacacatatatatattgatttgttactagagtgtcgttagtatgcaattgttcaatatacataatttatgttattagataacatttagacaattagttaaaatatatgtatttttttgtaatctaagggttgatttgtatattttaaaagtttctatcaaaagattgatttttgtaagtttcctgaaggaaaaaaaaaaaaaagacaaaacacaaagtggaggagaccaagctgacaaaacaatgtccgaaacggcttagaacggcttaaaacgccagcaaatttcgatctgaccaattgcagacccaaacaactcgtcgaatcttttttttttccttcttctttggctaatcagaaataataatacacggagaagaagaagaagatttgcgttttacgtgctctcaactataatctgcaagaccgagaaagattgatttcccttcttcttcacgtgcatgtttgtttctttcttctctctttctctcgtatagtttcgatctatctatctatctcacttagggttttcaattttaccccttttttctctgttccaattctctaacctctcttcgtcaaagctcttgctcattacatttccgagacacccatttgatcaatttcgtaagatttcaggatttttctcctcatgggttacatttgaatttgaattttcttcaagagaaaagttttggattccataaagttcgtaccttttggtgattgttcgattcgtagcaagttaattcgtgaacccttttgatctgaagtttcaaattttgttgctttttcagggtggaaatggaagttcttctcagaagtatctcgtcgtttctaaatctgtcatcttctaaacatattgatttagacccgtttgagaagtactataagagagttgaagagttattgagagtgttgaagcctatagcagatgttgttgttacctctgattttgtttttgatgagaaacttggtaaagcatttgaagaattgactcaggatgttgatcaatccattgatcttttcaggagttggcaagctttctctagtaaagtctatttcgtaagtccctaaacttctcttctcgtctcaggttgtatcttagctatatagagttttaacatatgcatagattagtttgctttatgattgttcggaagttttcttttgcctttagcttgaatccgtgacggttttaagatcaaattagtgaccattgtgttattctgcactcttgcttgagttttggttactgataaatcatttcgttgatgatagcctcttaatatctacgtctaggttcttcaaattgaatctttgctaccaaagatgcgggacaccattgtggatacttttcagtttctcatgtcttctaagaaccatctacctgatgagctaagcccagcttctcttgaggtaccttctctttacatttagaggaaatttgtatcaatttatatgctatagatatgtggtctgttcagaacattagctttaggttggaaattaaattggatcagttactgaattttgtggaaggggttgatcgtagtgatgctgactgctttatgttttgttgtgttgtccacattagcgattgaatcaaattgcaggagatacgaatggttaatttacaaatattcgtaattgcagcaatgtctagagaagattaagcatcttagttatgaagaaatatcttctgtcattgacggtgctttgagggatcagagagatggtgttggacctagccctgagatcttggtgaaaattggagagaacactggtcttagatcaaaccaggagattctgattgaagctgttgctctagagaggcagaaagagatggctgagcagtctgagaataatgcagaagtcgagttccttgaccaactgattgttattgtaaaccgcatgcatgaacgtcttcttctgatcaaacagactcagacttctagtgtcgccattcttgccgacttcttttgccctctgtcacttgaagtaatgactgatccagtgattgtgtcatcaggacaaacatatgaaaaggcgtttatcaagagatggattgatttgggtttaaaagtgtgtcccaagactcgacagaccctgactcacactactctaatacccaattacaccgtgaaggccttaatcgctaactggtgtgagacaaacgatgtcaagctgcctgatcccaataaatcaacaagtttaaatgagctttctcctcttttatcatgtacagactccattcctagcacgggtgctgatgtttctgctcgtaaagttagcaacaagtcacatgattgggatgcttcttcaagtgaaaccggtaagccctcgttctcaagccgagcaactgaaagagaaggtgcttctccttcacgtcctgcttctgccttgggtgcttcttcaccgggtatatctggaaatggttacggtttggacgccaggaggggatcactaaatgattttgaagatagatcaaacgattctcgagaactgaggacagatgcacctggtaggtcatctgtatcttcaactacacgaggctcagtagaaaatggacaaacatctgagaaccaccatcataggtccccttctgctactagcactgtttccaatgaggagtttccaagggcagatgcgaatgagaattcagaagaatcagctcatgctacaccttacagcagtgatgcttcaggagaaattagatcagggcctcttgctgcaaccacttcagcagctactcgccgagatttgtctgatttttccccaaaattcatggatagacgtacccgtggtcaattttggcgacgtccatcagagagactcggttcaaggattgtttcagcgccttcgaatgagacaagacgtgatctttctgaggtcgaaactcaagttaagaagttggtggaggagttgaaaagcagctcattggatactcagagacaagcaaccgcagaactaaggttgctagccaagcacaacatggataatcggatagtcattgggaactctggagcaatcgtcttattggtggaactactttactcaactgactcagctacacaggaaaacgctgttaccgcacttctcaacttatctatcaatgacaacaacaaaaaagcaattgctgatgctggtgcaattgagccgctcattcacgtgcttgaaaatgggagctctgaagccaaggagaattcagctgctactctcttcagcctctctgtaatagaagaaaacaagattaagattggtcagtcgggtgcaatcgggcctcttgtagatcttctcggtaacggtacccctcggggtaagaaagacgctgctactgccttgtttaatctatcgatacatcaagaaaacaaggcgatgatcgtgcaatcaggtgctgtgagatatcttattgatctgatggacccagcagctgggatggtggataaagcagttgctgttttggcaaatctagctacaattccggaaggaagaaacgcgattggtcaagaaggcggaatccctcttcttgttgaagtcgttgagttgggttcagctagagggaaagaaaacgcagcagcagctcttcttcaactttcaaccaacagtggtcggttctgcaacatggttcttcaagaaggcgccgttcctccactcgtcgctctctcacagtctggtactcctagagctagagaaaaggtacaaactttataactaatatatcatgttcctcttaatttaagtagccacactcatgactttgattgttttgaagagttctttatttggagaaaatcttgtaacttgtcaggcacaggcgttgctcagttacttcagaaaccaacggcatggaaacgctgggcgtggctgatgatggatgatgatgatgatgatgatgttgatgatgcacagattctggtctctcagtgcctatttttatgttttgtcttgtgaccaaagtagtgattttgtacaaaagaggtctcttctgcaaataattttttcgtactcaagattttttgttggttctctgtattctttaattttctattgattctcataataaactttgatttggaatagaatttttttttttttctttctgatttcataagacagtgtagctgtgaatatgaaatgagtgaaaatattttaccattgatgtgataattagcaaaattgagaacagtaattttgcagaaaatagcatgtattaaaattattatttgtatacataaaagacaaataatatatcaaaatgctgaatacaaaatgtgagctgtaatacatgagacaaatgggagaggatcaaaaaagatataaaataaataaaattaagaattgaaaaaaaaaaaaaaaaaaaagaagaacaaaaatttattagaaggctagaacaagtagagaccatgcgattgccgcagctcccaccatttgtatcacaacacttattctttgtgctccgctctgcagtaaaataattcgaaattttaagttctagaaactagaaagaatcaaatctaacaaaaaaattgtgatttcagacatttttaaattataacgaataacctaaactatagtcaaaagatgggactaatttacatttgtttttacttaagtgatatttttacatattacctaaattaatttaccatattgtttaggttaaatcatatattatttacctgatcgtcagcggcaggagagaaagcatcgcttggtccaggaccaggagcttctccgggcggagcaggcgggcttaaaagctccgaagctggtccaggagccggagcggtcttatgcttctttgtcttcttcttatgttttgtcagagctggagccggaacatcagctgaaggtgcaatctccggagctgaaggagtatcagcctccggtgaaggagcgggcggagagatctgaggtgtagaagcaggtgtaggagaaggaggagcctctacaggtgcttctaccggagtcttcgccggagcctccgtggattccggcgttggagcagctggagaaatggcgggagatgtgggtttaggcttatgaggagatgtagaaggagaatggatcggtgcggtggccggagattggccaccgacggtgatgaaaacaatgcagatcaatgtaaccgtcaagagaatattgcgagtcataatttgtaattagttgagagaattaaggaattagagaaaaagtgagtgttgagtgaagaatgctcgagtgtatgtatctttgcatgttgtatataggagaaaatatttgagagatctggaccgttgaagggacctacggtgattagtagccgttggagcagagtataaaaattatgtgtggttgttgtaatatttgagctaggcccagtctggcattgggcccaatatctttggttgtttcctaattttggttttctacggcattttttgtttttgtttgctagacggataaacagctggagagttggcatattccggtgatggtcccatctcagccaccatcaccgtcaccgctatggacacgcatacgaaaacaaaaatttcttttcagtgatattcttattttgagatttgtttttctaacgagattgcttatgtttttgtttgggaaatattagtcttactttgttcaactctataatcacaatggtggacaagtaatactttgcatgcatttttccataattaaaacaaaagtatgaatcgatcggatcggatatcaaaccacataatgtatatataaccatatgatactacttacacagttacactacatactatacattgcatatacaagttactttagtcttagtataaatccatttttgtaaccgtttaatttttggaagtggatatgccattgtggagacaatgacaaatggaaattaccaccgagagcagcggcgtgtcgatgatgccattatttttatttttgtggtcctgagaagaacaaatcattttacaagcattgtacatacatatgactttttacaaaacagtgttaagtttatttgttcatgcttttttttggttacatgcaattaataaccgattggtccgaaccgaaccaactcaacatgatacttttatggttcactgtgccagctttatccatgttatgtttcaaagggttatggaaaaaatcgttgtcgatgggtatttgcgagaccacgcccaatggaaaaaatcctggtccaataacagatgagccacatgcctcgtaaaaagctgatttaatcgacccaaaccaaagtatacaaacataacatctaaagatggccatttaatttcaaactgaattaatttttgctatacacacaatgttttgtaatcagagaactgaatcaatcagtagcacgtagcaaccatatacactaatctaaacttattttattttataaaaaaatctataaatttttaattaatttaactaataaatatatgtttctgattaatttatatatatactttatcggttgactacatataatttgtgaggcacacacatatcatattgagattaagtccaagatctggctatcaccaaccacgtgtacgtgggcaaataaaatatccccttcaacaaaatattcgttcgtaccataaagtcacaaagccaccgacttcgcttggcatcatcacacatcatgatgatcaccggctctttagaatattaattaattaagacgctctagtatgatcgggaatagataatgattttgtttctaatagaaagtatcgatctaatattattgtaaaaaacccaaaacgcatcaattattcaacagataatgttcttattttggatagtactattcataaaattccaaacaaaaacccaagatcggatatttggattgaataccaaagttggctttgtgaccaagaactaaataatttcaattcgattttttttatttcaattttgatgaaatactaaattaataaattaagttatatgatcgacggagataaaactagataacattggtcattatcaaaaagaaataagctt

SEQ ID NO: 271 - DNA, 123360 bp, Arabidopsis thaliana
gaattccgaggttcatgaaattcataaacatgtttcccttaaaatacaaagttttttcattagtgatataaaatattgtacgatccaacgttcattaagcgtacgtggcccatttcgatcagatcctacccgacacatcctctctctacacagagtctcactctccctctaaagttgttttaactctttttcttccttaaccattttcatttgtcttcttcatttcctctttctctgtttttatagtctccagtgttgtgttcttggagaggatcggttaagtattggttaagaaggtgaggaaagttttgatctttatgaatgggttttcttcaaatcttctaaatgtggctagataaaaaagatgactttattgtgattcgtcatgggtttctctttaaagtcttaaactttatgaattggatttttcttctttttagtgtattgtgcatgtataagccattgatcgagattagctcatgctttctatttatacatttgtaggaagaattttgtttgttctgtgatttgggaatttttaggacaatgagagttttttgtcctcaatcttgggtttgagtcacattcgcttgtaaatgttggtccattttgagaaatgtgggattggagaaatcaaacaaatcaagaaaaaatctgtgtctttttatgggtttagtttatgtaaagatgttttaaagtttttctgtttttttttgctttctgtgtaataggatgttgtgaaaagtttcaagagtagttgtgtgtggcttgttggaggtaataaatggaccataaagcatggccttggaagaagaaatcaatggagaaaaccgttgttgaaagcaatggagaggttagtggaaatgatgttgataacattaatgtttgatgttaggttggggaatggatcttctttgctcatttatgtatcttttagagatgttaggtttagtatcagagtgtgatctgtttgacattcatgtgttgtttagctcattgtgtttgaggttaaacttgtcaagaaaaatccctcaagctttgtgatgtagtttgagacacccatgattgtgaaacttgtgtaatagctaagattatcttgatgagttaggtttttgactcatctgcttttagccgtatttgctgattcatgagcttgattgttcatttgttcttggcattcgactgagaaggttgtggctgacaagatagagctggaacatcgcgtgaaaagtctaaatgataagcttaactctgtggaggctgagagcaataagcatgagactgaggcgcaagaagcaattgttggtaactatactgaatcttaatctacaaaccttattttcctcgattttggtgctcttcacggtctcatgtggcttcctgttccatttgcgttttgtgttaacaggctgggagaagacaaaagctgaagtagcatctctcaaaaagaaacttgatgaagctttgaatgaaaaacacaggagtgaggaaaggtcgagtcacacggatgctggtctaaaagaatgtgtgcagcagcttcgttttgttcgtgaggagcaggagcgaaggatgcatgatgctttgacaaaagcatcacaggagtacgaacggcgattgattgttataaagacggaattggcaggtagtggtaagaggcttgctgaagcagaaggcgagaatgctcaactctcaaaggctttgttagcaaagaacaaaactgttgaagatttaaacagagagagggaccgtatagaggttgatttcaattctttggtgagtagtttagagtcgaaagagaaagaaaacgtttcattgagatatgaagttcgagtgctggagaaagagctcgagcttcggaatgaagagagagagtttagccgtcgaactgctgaagcatcgcataaactgcacttagagaatgtgaagaaagttgcaaagttagaatcagagtgtcaaaggttacgggttctggtcaggaaacggttaccaggacccgctgctctttctaaaatgagcaatgaagtagagatgttgggaaggagaagggtcaatggaagccctcatagtccgatgattgattccgaaaaaatcaataaccttactgaacaattatgcttactggaagaagagaacaaaactctaagggaagccttaaacaagaaagtcagtgagcttcagttctcgagaaatatgtattctcgaacagcgtctagactactagaattcgagtctcatcttgaagaatcttctagaggtacaaacattgagccaagcaggagtagcaatgtgtcacatgaagtctctcttgcatccgtaacagagtttgacaatgatgataaagttagctgtgccgattcctgggcttctgctttactttcagagttggacaatttcaagaacaagaaggaaatgggcacgagtttggttggaacccctaaagctgcagagatgaaactaatggatgattttgctgaaatggagaagcttgcaatggttgctagtacaatcgataaccgacctggaagttctcctatttgttcttctgattctatttcagctactggtccggtagagaacgaatctaatgagaattcatcagaagcaactaaaacttctggaacagtttattcattgaatcctgatgcatctcccaaagatgatatcaagtcagattcgttacctcaatctcttcatatagtcttgaaagcggtaatggagcataagcatatcacgcagagaaacactgatgaagtacttgaagatatcagaaaagctctgtcaagtgtaaaccattcaagcttttctacaaaccatcaggagactaagactcttactgtggaggatagactggatatggagtgtaatatcagcaaatcaattcacagaatcattgacgttatcgagggagtcagtcttaaagatgagaggcatgtgtccaacagagaatcagaaaggctttcaggttacactgctcgcgtcttgcaatggaaaactacagagctaagtagtgtattgcagcgatttcttcaagcttgttacgatctattagacagaaaagcagacatgaagaagtttgctcaagagctaagctctgtgttggaatggatggtgaaccactgtttttctcttcaagatgtttcaaccatgagagatgagattaagaagcagttcgagtgggatgaatcacggagcggaagcgaagttgatattggaatatttcgtcaggtttcagaagcagagaagcttagaacggaagatgtttcctttttggcttgcaaagatcagttgattgaagacaaacctggtaatcaaaacttgtcgcgcaaaacggttgaagaagaggcaaatgacaaaacagcgaggtaaatatgaatgcttaaagacttcatgtcagcaaaatcatacattttatctctgatgcatccaatggttttcttgttgcagtgcttcagagaacgagctcaagctggaggaaaaacaaaacatgcgaaccgtaagttacaagcagaagaaaatcgataccattacattgagagttgtttttgtccaagaccaatctgttttatgtgtttgatgattcaggaattggaaatcgctgctgcttcagaaaagttggccgagtgtcaagagacgattctaaacctgggaaagcagctcaaggcattgactaactcaaaggaaacagctttactttcagaaacactcatgtacgacgttacagacaaatcgaacaacctacctgatgcacaaccttcacatgagactactaaaccagagaagagattgaccagccagagatcatctcttttggatcagatgaaggcagaagatcacaacaccggggaatccaaggatcagaaaccgcaagcagcagataaaaacggaaagggaggaaacagctctgtttacaatgaaaccattgaggcactagaacagattcttctctcagacaaaagcaaaggctccgactcaaactgctttgccattgttcctcagaaaaagaccggcggagttaagagcctctggagaaagctgttggggagaaataagaaaggtaagagcaagaaggtccctaatccatttgccaactaagaagatggtggcatctgtcatctagactataatctaataccttaatcctgtttctttatatggtcccaaagacccaaactatgcaaactaaactgtcattttctagatttttttggcagtatatatataatctccacgtagagtattactctataagatgatcattctgctttattccacttttagtctcagaaaggatacaatcagtaatcttgacccaatgaatctttagcagggttaatgtaaatcttcaacgtagacactaaatgcataagatcatttgatataatgtcatctcaggtctcaaaagaacaaattgtggcctttaaaagagacttctcaatctctgtacagaacaaacttggcgatgtcgttaagtccagcttccttgtagcactgagcaacccgttccagtgattcgtcccatgtcccttcaagtgacgctagattcagtaagaacgcagcctcgtccaaagatgcctgagaattacaagttttgtttcaagcctttgtatccataagcatgatatgagtatctgataatgaatacaggcaaagaacaaacctgagccattggctttcccctgtctatatcccgttgttttccttctcctgtaactctctccttatactgcgcaatttgctcttctccccactctgctatttgagcaatttcctgggaacccgtttcatatgttcaacacttttttcccttctcttttcgattaccaaaattgcttgtcgatagtcaaggaattgtacctcatatctgcatcctaaggtccaccacgaagatttcaaagcacccctagctgcgtctttcgcttctaagttacgcccaagtctacaaaatatatagaggtcttagagttttctagaaaggacgtaagcatttacctgggggtcgttcacaagggagaaagagggatgatgagaaaggatcatacgaacttcagtaaaacttttgcgttgaaagcgaatggccgggcaaatccgggaaagttccctctctttgtataaaactcggtagccaccaaagctgaaaccttgtattagcacgtgaagatagtttaaaaagagaaaacacgtcaactacaacaggatagatataattactagccttacatggtctccattctcgatatgccgaataacttttcgttcaagagaatctggaaacaatccaacctgaattacaaagctaataatcatatcccagtatccatgtgcagaaaagattctgatattaacaggctcaatatatgtacctttcttaaaagataggcatctaaatccatcagtcttgaactggcaaagtcacccttactgtaaagtttcttcccagcttcaccagcagcattgaagatttcttggctgcattcttcgggtttggaaacatcttcttccaccaatattctgtgaatgaactgatcaacctgaatgttggccaatgaagtcagatatgagaatgaacactcaacaaaaataaccctaaattaacgcatcagtaatgctataaaaagactcattacattattagctagaaaccaaaccccatgtttctgaacttccaccacaggcatctccatactgcaaacaccacaaacaatgataagctacaaaagaagagaaacatgacgatattaaaaaagcaaggaggatctaacctagaaggagctgttggccaccgtaatagagcaattgaagaacctgaaaaaggaaagtcatacaaacttaatatgaaagtgttacaacctcagataagaacttatgtacaagtccagaatcatacccgggctcattttcaccaacggaatagtaagaggtaacaagccttgcttggcaccaggagaaactatggatttacctgatccaatgtcattaccacaagcaaaagtcaccattccgcaagttaacaaacaaaaacttcgaaaatacgatcagcaagtcagtgtaagattgatttacctctagctgtgaatatattcagcagctgcatcagatgcttaggaggctgagcttttgctatatccttaatgaaacattcatgttctgcacataatcaatcgttaacttcgattcactgattgttcaaattcggcaccgtaagaatcataaaccaatctcaagccatcgcacagcttccagaagttgcaaatgaaatagcgaagatgtgaatccctctcaccagatagtgaagaagaagagcaaaaggatctggcgaagtttctgctgccatggagaagtatcagtctacgtttccgtccgaaaaccgccgcgccgcgatgcatctcagagttttccgatcgccgtactgtttctcgtccgatgagattacagagagacttcgaaaagctgttgctgaaaaaaaaaacaaaaaataaagcccaaacaaatagggtttaagagcccattaaatcagagcccagcaacgttcgtgtttgttttgttcagttgatatagaaccagtctcgaactctagtagattcgttgtctcgagctacgtgatattccggtaaaccgtcgccggagatgtacagtagataattcaaatcgagctgccacgtcgctattttcccaccaacttttttttttttaaataattggaaaaagtttctaatttacacgcttcccaattcgtaaacaatgttctttaaaagtaaaacgaaattttttttggatttgaagataaaagatccaaaataaaaacaaaattgaagataaatttttagggtttataacgacccgccaaattccttctctcctccaacatttcagatttcgcgacccggatcttaacccggacccgcatttgtttcggttccgatctggtttcttgacaatggcgtcagaagcttcgccttcttcttcggccaccagatcggagccacccaaagactctccggtgcgtcaatcgttttttttttttttcttactttctaaaaatggaacttttttctttgtgctattgaggcattgactttgatttgctttagtttgagtgaagagaacgaaactcgatggcttgtttgagcttctctatatgctcgtttttagatctagagattgctggattgtgagatatgaagttgtttttgggttcgtttaggaaccatttttgctgcaattgatagtttctctcattgaacactgtgtaaaggaacctcattttgatgtttcaggcggaggagagaggtccagcttctaaggaagtatcagaagtaatagaatcgctaaagaagaagcttgcagctgataggtgtatatcaataaaggttgctatttttgtttagttttttttttgtatgttttatgtgtttctgaatctgattgttagaaattgatgtgtttgtaaccagaaaaggattgatgaaaacaagaagaatttgtttgctattactcaaagttttatgaggtcttctatggaacgaggaggtagctgtaaagatggcagtgatcttttagttaagaggcaaagagattcgccaggtatgaaaagcggaatcgatgaaagtaataacaacagatatgtagaagatggacctgccagttcaggaatggttcaaggatctagtgtccctgtcaaaatttccttacgtcctatcaaaatgcctgatatcaaacgtttgtcaccttataccacatgggtttttctggacaggtatgttgacattaatgtcgcaagagtacttgaaaatattcaagttgaaatgtaagcccctcgcatagtatcttaacgttataatcactcttgaaatgatgcagaaatcaaagaatgactgaagaccagtctgtagtgggtcgaaggagaatttattatgatcaaactggcggggaagcgcttatctgcagtgatagtgaagaggaggccattgacgacgaagaagaaaaaagagattttttggagcctgaagattatattattcggttagtattaaatggcaggagtttaatcattcttgcattttggtctcttagtgtgaatctcttgtctgctatgtcaactgttatgctggtttgttctcacttatattgttggattaaatttcccttcgtttcttcagcatgacccttgagcaactaggtctttcagactcagtcctggcggaactagcaagtttcttgtctagaagtactagtgaaatcaaggtatcaacaacttttttctctgcctattgcttgtgtgaactatcatgtgctattttctttagaatcaagcacttcagttgtaggatttcaaaacagagtgagggatgcattgtttaaggaaatccaattagtattgttccagccctttcccaattggctttttgcagagatatgaacaccgaccatcttatacaggcaagacatggagtgcttatgaaggaaaaagaagtatccgagagtggcgataatcaagcagagagctcccttctcaacaaagatatggaaggagcattagattctttcgataacctgttctgccgtagatgccttgttagtccatttgattttctcaggctaatgtttcatgggttattgcttaatgatcgagcaaacattggtctctttttaacttttgtatgcatctatgcaggtatttgattgccggcttcatgggtgttcacaggatctcatttttccggtgagtttagtgccaaccgaaaaaatcttactataactttagtgttacttatctaattttatggatttttaggctgagaaaccagctccatggtgtcctcctgtagatgaaaatttaacctgtggtgcaaactgctataaaacggtaaatttgttattttctcgttgctaagctcatctcctagaaagactggtttaacaaaaagcgttgttttcaatttatcagcttctcaagtctggaagatttccgggatatggcaccattgaaggtaaaactggcacttcatcagatggtgcaggtactaaaaccacacccacgaagttctccagcaaacttaatgggagaaaaccaaagaccttcccaagtgaaagtgcatcgtctaatgaaaagtgcgcactagaaacaagtgactcagagaatggactacagcaggataccaattccgataaagtttcatcatcgccaaaggtgaaaggtagtgggagacgagtaggtcgtaagaggaacaaaaaccgagttgctgagcgagttcctcgtaagactcagaagaggcagaagaagacagaagcctcggatagtgattccatcgccagtggaagttgttcacccagcgatgcaaaacataaagataatgaagatgctacttcctcttctcagaagcatgtaaaatctgggaactccgggaagtcaaggaagaatggcactcctgccgaagtctccaataattctgtgaaggatgacgttcctgtttgccagtcaaatgaggttgcgtcagagcttgatgcgccgggtagtgatgaaagtctaaggaaagaagagtttatgggtgaaactgtatctcgaggaagattggctacaaataagttgtggagaccacttgagaaaagcctttttgataaaggtgttgagatttttggaatgaataggtgggtaattttgatgtatttagctactgctaaattatcattctgcttcaggtttttcaatttgtggaatatagtcatatggattctttgtttctttgcagctgcttgattgctagaaatcttttgagtggtttcaaatcatgttgggaggtcttccaatacatgacgtgctcggaaaataaagcttccttctttggaggtgatggattgaatcctgatggctcttccaagttcgatatcaatggaaatatggtatattaacactaaacctttttgactttgtttacaaattcctgataaaatcgatttatttctcttcggatttaatgctttagtttctggactaaccaggttaataaccaagtgaggagaaggtcaagatttctacgtaggagaggcaaagtgcggcgcttgaagtatacctggaagtctgctgcatatcattcaattaggaaaagaattactgagaagaaagaccagccctgccgtcagtttaatccatgtaactgcaaaattgcttgtgggaaggaatgtccttgtttgctaaacgggacttgctgcgagaagtactgcgggtaatgtaatctatgattatccacatctgtatttcttagctttgaatctcattaccaacaaactatattttctgtgtagttgcccaaagagctgcaagaataggtttagaggttgtcattgtgccaaaagtcagtgtcgaagccgccagtgtccatgctttgctgcagatcgggaatgtgacccagatgtttgtagaaactgctgggtcatgtaagtcttattggggatgcaaatccatcctaattggtttcttagaaaatgctcaagaaatgcaactttttttttagtagttccagatgcacttatactgtgtctgaatgaatttgaatgtgtagtggtggggatggttcgcttggggtcccaagccaaagaggcgataattatgagtgcaggaatatgaaattgctcctgaaacaacaacaaagggtaaatacttagccttgttaactaaatatctatgatctgcaatcaaatgattaaacatgaaatggctaaatttcctcctcttttttatgttaatttcaggttttacttggaatatctgatgtttctggttggggagctttcttaaaggtatattaggttcaaaatttgttaaactgataagtccttcaaagattaatctatgtttagagtatgaacttgccttaagaacaattatttttccttcttacagaacagtgtaagtaagcatgaataccttggggaatacacaggagagctgatctcacataaagaggcagataaacgcgggaagatatacgatcgcgagaactgctcttttctcttcaatctaaacgatcaggcacgtctcagcagctttgaaatgtcccaactctctttctctctagtctctaggttgtcttcaaattttaaaatgtttttggattgtgctgcagtttgtgctagatgcttacaggaaaggagataaactgaaattcgccaaccattctcctgaacctaactgttacgcaaaggtaaaaatgtgaaaagtgcaagttaaagatacggttttcgcatgatgggtatgttctgtttttcctcaaaatctttgtatctgttcaaggtcatcatggttgctggagatcacagggtggggatcttcgcaaaagagaggatactggctggagaagaactattttacgattaccggtatgagccagatcgagctccagcttgggccaaaaaacctgaagctcctggttctaagaaagacgaaaatgttacaccttctgttggtagacccaagaagcttgcttagcaacaaaagaaacaaccatttttttgtcaattctttggttacaggtggaagaacgctttaatcctcattactctccacacggaagaacacattgaaacaaattcatacattttgctgagtctaaagaaaaattgtattcgttggattaaaatttccttttttcgttttacatttctggattatcattttattgtactgagactcgggttaaagtttttaaattacagatgagaaacttggtgagctttggagctgacatcaatgtggtattcctcacacatcacaatctatataaattaaattaggcgtcagtgtacatttggtgatcagaaagtaacaaaaccaaatcagaaaacgaacatgagcagccaaattaaaatgtacattgacgcataaacctaagaattaagatatacaagaatgtttgcgataaccaagatataaatgcatctattctattttctctttgaagggtccatcttcatgcatcagtctgatgacataatccatctgcgatgcacaaagttacattgtttaagtcgatgatccaattacatagctatgtttatatactcttttaacaccataacttcaaaacatacctgatttgattcgcgcactaaaaactcgtctatggcttgcctgaaaccttcatcgaatatgtaatggcaactatatgttttaacgggaaggtagcctcgctgaatcttatgctcaccctgcgctccagcttctaccgttttcagattaagctctatcgctgcttcaattgcctatgaatcccattatcagtttgtgagttttaatcaagtatgtctcggcgaaaactcttgagactttgaaacaacaagaccaacctggtaatagcatgcttcaaaatggagactaggataataggagtcgggacgacatccccatagtctcccaaatagagtatctcctccaatgagattcaatgctcctgcaacaggttcctcgttttcttcagctaaaacaagcaataccttgtctcccaacttcgatgccatgtcgtgaaagaaatcccttgtgagataaggtgtgccccatctaaaattagccggaaatcgttaagcatgtgaaaggacaaacacaggtaatgcatacacttgacgatgacaggtaattgaatgtaagtatgtttattatgcacaaagacacataatgtgtactaatgataagaaaaacaaaaatgtctcaaagataaagactaaacttgttatcagttgtgttcctgtagaaatcatagaaggaatcccagtgcctagcctgcaaaaacattaggcacaaacgatgaatcaaatttttaagacacatattaatataaaagccccataatgtcctttatagcatgtgccatcagttctaacctctggtagcagattgatatcccatggttgattatttatagccattaaaatgaaaagataccgccaggcataatcaattacaacaaattcgtctcgtggcagttcagttacatacctttatatcatctccttgtagccgtctcattttcaaattctgggtaccaatctactagagaaaaggagcattagaagtcagcagcgtgcttgaaaaacgccacaaggaacggataacgaaataaggccacaattcaaaagttgtatgggaagaaaaaaagagtaaccattccattttactattcacatgagcaaagaaacttaagagacaagaataaattgcacaatgaggatgatatgaaaagaggaaactaaacaaacctttttgcgttcctgtcggatatttttccttttgctttgcttcatgtccatcaagaactcgtcaaaactgaagtattagagataaaaaaaaaaatgaacaaaatataatagcaactacttccaatccagtcattgttaagaactaatatactggcaactaacttcaattactttttataatcacgatttttccagtggtactgcattccaatcctttgtgagaagcctttctctttcaatttgtcccactcagctccagacggaaatgtaatgtgcaaagatgaaacttgtaactgccaaagcccacagaatacaactagtctgtcagcagtcagcagatagcatatgttgaaagcagaactcaacacaagagaaccattacagcttcaagaaagtaaaatgtgagattgttcctatagtaataaggatagctaataaatagtagaaccttagttctgtataccatgagatcacaagtttaatcctgttccaagtcttgtttttatctataacacagatagatttcatatagagatcatacctttgatgccaattccgtcatggcagaaacaatagcatcaaaaacttgctctttgcaaggattatcacggataagaatcctaggaccagtaactggggtgaaaggaacacaacactgaagtttaggataatatcttccgccaaaacttcggtatgcatcagcccaagaatgatcaaaaacaaattcgccataagaatggcttttgagataaagtggaacaacacccaaaatactctcacattcatcctttgcaacaatgtgtaatggcatccaacctgtttcctaataacattttgcagatagaaattcccataagaaagacaaacatctatgcttgcttctttcggttgaagaataaaggaaattgcttcactaacccgaacggcacaaccagtatcttctaaactggaaagaaatccataacttagaaatggattatagctttcaggttgagaagaatccaacgcacatgcatcccattcagcttgtggtatctcaaatattgaagaaacaactgatagtgaaatcaccttttgcttcggcttgttttccaaagcttcctaaactcgaaacgaaaccactattagagaactgatgatttatcaactaaaatcaacaaagaaaattgaaatgttaaagcgaataatttggcacgaaaagttcgtagctaacagcgtctgaaagctgtttacataaaaaataatcaacaaagagattgaaatacctcaatgtttgattcagttagagtgtaatctctaagtgatatatcgaattcctttacttccgcaggcttattggacttccaaaacatagcagtaaccgaagatgatcgtcttgaactcctaacattttctttcttccacaaatttccctacagagagatgatgaagatgatgatgagattgaattatctgaatccaaaagtctaattgtatagctacgaattcgtaagagtaagccatagataacatcatagccaaagaaaaactcacgcagcgacgatggaatcgacgaagaggaggcgaaggtttgcagtaggaaagtacaacggccatggacgaaactggttacgcgtcggtgtgtttgaagaggaacgtgaaaatggagttccgacgcgacggcgacggcggcggctccggcgctcaagtggagtcacagtggtcgctgatgatttttttgattcatgggaatttggtttatttgcttcgtgacgtgtcaattttggggtcttcagttatttttttgcgttgtcgataaggtgggctattgatttgacagctaggcccattaaatcgagtggacatggacctttaaagcccaaactatttcccgcaaagactgattttcaattttagtgctgtagaactaggtttctgagatattttcttgtatagcaagatattgatttttagtaacaaactgatacatgcgtagaaggagaagcaaagacatcactgattttatccgatttaaagacatatattacaatgaaacgtgaaacaaagagcaagtagtttgatagaaattatagatgaataaagaggatgaaaggtggatcacacgcgacaaccaaatcgtctttccctgccctgatacgaagcgagggcctctagaagcttatccttatcgaaatcaggccacaataccggcgagtagaaaagctcggtataagcaagttgccacaagaagaagttactaatcctttgttctccacttgtcctaatcattaaatcaggacttgggaagtcactacaattcgttagaagctctctctcgatcaatgcctcgtctacatcttcctctcggatcaaccctttttctgatttcttcacaagactcttgcaagcatgcatgatatcaaatttcccgctgtaatctactgccatgatgagatgcttattcttgtagccttggtagcttcctctatctcatggatttctttgaggagagattcagggatcttcgttttattcccgataacagaaacgcgaacttcctttctgtaacaacaagataattcttggtaatgaataaccagagagaatatgtcaaaacaaaagaatcacaatcgaatttgtatatatacctttgaaagtattgaatgttggacttgaggtagtggttgaacaaagacattaagcacttaacctcaaacttatataataacaacaaaatttgttagtgtctataattgtatgagaatataatctacttgtgagatctacaatgtaaaatgtcacaccttgtctcttccccaattctctgtggagaaagcaaaagctgagactgtatgaatacccaactcgaagcagacctcggctatctctataattcgtttagttccagcctcgtggccttgtgccgtcgtcaatccgtctcgtttggcccatctccggttcccatctagtatgaatgacacgtgtctcggcatcagctctctttgtagctcctcctctcggacaacacaagttgcctcatcactatacaaccaaaaaattattgctaaaacacatatatattgtccaaaaattcttccgatgtgggataattctaacaaaaggctctctctatgtgtacttgtgtagtataatttctgttgataactagatattaactagtgattataaaattgaaattaaattatgattctcttctcgggagactttcaaaaataccatttatatgatgtcactcttgtacaaaacattttacaaattatagatttacaaaacattccacaaacataacttactaaaaactaaaagtatgattaaaaaaccgtaaactaccgtttctcgttgtcatcatcgtctcgagcggctttgaatttgatgagtccaaggagttttgtcaagaacacagggaaacatatatagcttgtgataaagagacaagggatgagaaacagaaaggggagggctactagagtagagagaagagacaacattcttgtccttgctaatgcttaatttggctttgctttaatgttaatttgttcgagttattgaagctttgtcatacacatatatatactaagaattcaaagacgtcgctttgatcaatcaaactacgcaaagacaggtcttacgtattaaactcttccgtggagaatcatttatattaagttaatcgatgtttgtaacggtttatctatctttttccagctgcattagggctttgagaacccacgtgattggtttcttgtgtcacaagacttttattggtttcttgtgtcacaagacttttattggtttcttgtgaaacaagccttttttggtttcttgtgtctggtgcttctgaagaggatcggaaaaggagacccttctgtgcgcgacggtgactttaggttttgattcatggatttttgcttcgtgacgtgtcactctctggggacttcagttgttttgtgtggtcgaaaaggtgggctaatatactttgatttgacacttagacccatttaatcgagtgaatttggatctttatcaatctatttcccgcaaaaaaaaagtgaattggtttgaagatgttttaattaaaaaatcagaaactttgcctagttttggggtgatggtttggagttttaaattgtaatgttgttgaactagaggaatctgaggtattaaagttacttgtttagcaagttattggttttagtaacaactgtcaactgatacataaaacatgcgtataaagcgaagcacggagaaagaaataaacgcatcactgattttattcgatttttaccgacacaaattacaatgatacgcaagaagtttggtagaaattacagatgaacaaaacataatagagaggatgaaaggtggatcaaacccgacaaccaaatcgtctttccctacgctgatacgaagcaagagcctctagaagcttatccttatcgaaatcaggccaaaataccggcgagaagaaaagctcggaataagcaagttgccacaagaagaagttactaatcctctgttctccacttgtcctaatcattaaatcaggacttgggaagtcactacaatttgtcaaaagctctctctcgatcaatgcctcgtctacatcttcctctcggatcaaccctttttctgatttcttcacaagactcttgcaagcatgcatgatatcaaatttcccgctgtaatctactgccatgatgagatgtttattcttgtagcctttggtagcttcctctatctcatggatttctttgaggagagattcagggatcttcgttttattcccgataacagaaacgcgaacttccgatctgaaacaagaagagcttgctaataaatgagcttaccaatatgttaaacaaattttttttattatatttatattttatacctgtggaagaatttgatgttggacttattgcggtagtgttggatcaaagacatcaagttatcaatctcaatcttaataataacaacaaattgttagaatcgataattgtatgagaatgtaagctacatactttttccaaaatgtcacaccttgtctcttccccaattctctgtggagaaagcaaaagctgagactgtatgaacccccaactcgaagcagagctcggcgatatctataagccgtttagctcccgcctcgtggccttgtgacgtcgtcaatccggcccgtttggcccatctccggttcccatccagtatgaatgccacgtgtctcggcattagttctctttgtaacccatcctcgcggacaacataagttccctcatcacttcacaaacacaaaaagccaatgttaagtcatgatccaaccaaaactgtcttgtttcaaaataccactcttcaaacaccaaattttgtttttgtccatattcaaaaataccacaaactagattttcagacttttataaatatggtatagaaagtgtttataagggttttataacatgtgtggctagaaattgcttataaagtttacagcgtggatataacttaaaagattgacattttgtatgaaaaaatgtatatgtgtaacacacagcagattaagttattgctaattggctaaatgcatgccaaattttatttgaaggttgtaggtttttaatgacaagtttgaaaattttagttaagagagtactaaaacatataactactactaaaactaaaagtatgattagaaaacgcgaactataccgtttctcgttgtctcgagcagctttgattttgatgagtccgatgagttttagcaagaacacagggaagcctatatagcttgtgataaagagacaagggatgagaaagagaaagaggagtgataatagagaagaatcagaagaaagaagagacaacattgttgtgacaacttaatttggctttgcctcgatgtttgtttgagttattgaggctttctcatttacagtatatatattaagaaatcaaagacattgatcaatcaaactacgcaaagacaggtggtaatacgtattacactcttccttggtgaaactttaatatcagttaatagaagttttgtaacgttatctatcttttttccagctgcaagttgtaacgttttgtaacgtattacactagggctttggaagttggaacccacgtgattggtttcttgtgtcacaagactgtgattagcaccaataattttagagaaattaattaaactctcttatttttctggccaattacgagtctggttaaaatatattgaccgaaaaaggtctttataaattacacggaaaatgttgagatgagaagaatccaaaactctcttatcacagtatgttaattaccaaaaaaaaaaaaaaggaagtaaaatcacagtgctcgctgatgatttttcttaaatcatggaacgtacatgaatttgaattcttcctcgtgacactctttggttgacatttttaaccaacagaattgtttgcagttgaaacaagcttttgagttttgaccgtacaaaattagtcgatatgctatacgaagatctctataagaaagatctgtcgaaccgagtagtttgaaagatagttaagcctgctacatgtgcagtgttctccaagagaaaaaaaaaaacacaagaaaacatggggcaagttcatggagtgttagacaaagagaaaaacgtgtcgtagttaacatgtcttaaaaaggcatgcagataaagttcatgacagaaggatttcatggtaaactatggtcgatgtatatgccatcatcatgtggaaaatgaatcatatgctagctttgtcaaataaaagaatatataaaagacatctcgtacacaatattatattttagattgaataaataagagttcagaatattaatatacttcgctgctcttttgctacaccataatactgtgttgaaacgtacataactacatatatgtgcaagaagatgttattatagccattaaacttgatcctaaaaaaaaatcttaattatttttcttttcatcttaaatactaattttgtaactcaatcttaaatgtgcatatgcttttatcaagtgtttttgatagctatattattttaattctatttatatgaaaaaaacatatacaggtggaagatttctttgttgaaatgcaagaaaaaataatttctatttgttgaataaatgtcttaaatggagaaagctccttggatatcattgcatatgttaaaattttctacatttcaacaaagaatatagaaaatttctatgtttttctttgttagtgtgacagaatctactaaaaaatacatatttttatgccaatggttaatatgtttaacgttttgtgttttagtgatatcatacaaaagtttctagctagctagatttttatgccaatggctctctccatttttttatgattaaattttcaaaaaactaacaagagaactttgtgtattatttcttggttttttatactccaatggtaggttctcttaaaggaggtctcttaaaaaaaaaatattcatataaattattttatttcatacaacttaatattacaaagcataaaatattaaaatacattttttggaaatattataaaatagatgtgaaataaatattataatgtttagttaaatatataattttgtcataaattatgagctaattaaaacaaaattagtaaaccaaaacatttagggggatgtattggattagggattttagaagatttttgtttttcttaaaaaccatatcaaatctagtgttattcaaaaattaaaaggtttttgttcctctactcatcaacaaattaaaattcttataatttttttttttttgtttggcttgaatctgcatgactcactcaaattagaagccaattactatcatcaaattagagatacatttaactatgaagcgaattactatcaccaaatcatgagctatatgtgttccatagttacagagtctatcaccaaaatacataacgccaacaaaacaaactcctagtcttgtacatctatgaagccaatgactcaaaacatacaacataaccatcatgaagccaattactaagaaaaagcaacaaaagaaagagatagatacagagaaaagagaaaatacttgagcaagttgggactgagtcagcttcttgtcttctcgggcttgcatgatggctttcttcaacttagtgggcacacgatcacctgattttaaaaccatataaaggtgttaacgataaccagcattacgaatcaatcaaacacatatgtagacttcctctcgctaataatgcaaactgaagaaaatattaataacccaagagaacagactagattactagaatgactgtacccaagcaaaagctggttcttatgggatccaaatcaacaacactgatccccatgcaacaaacaataaaacgaaacagatcaatcagataacttcttcgttttctaaagaaccaaatcatctacacaactaaatcaatcaaagcttagtcatcttcctatctgacaatgctctgattcgagggaacgaagcaagggtttggtgggagattggatttgggacaaacacatatagaattgggtcatcgatttggtgaaacgaactcggaatggtgagcagcgtcgagagagacgaccaatagagagagtgagaaaatttcccgacggaatgaaaaataaagacacaaggattttttgttggttaaatatatcaaccaaccactgactgccacgtaggaggctctctccagaattatttgttttgattatttttaatcaacaacttcaagagaaccctatcaaattgtgatactcatatcatgacactgacaaataaaagagaccatgaatatggttaggccatatgcgatatggcttcaaaaaccaagttgggacaatcttatgtttagtcttaagtttgagttcattttaattcattttagatactattgtttgatgtaaaattaaactttgataaataaatgtacctaaatttggattgattttttcataatcatgtttaaaatttttggtgttatgcaattctgttttgttttgtttttccataataagcatctgaacatttttacaatatttatatattttaagaaactgaagttttaagatgtattaatctacattaaccttttctattttaatgttaacaaatattatatattataagtacaatattcatcaaatactataacatatatgtgaaatgtaaatatttactactaatcaaatatcatactgcatatttgattgcaaaagagctaaaaatcattaatattgcacattaaaaatagtcaataaactaaaatcattaaatacacaaatatatcataacacagcaagtgtgtaccattattaatcaatagatttacgctatacaagttttccgaattatgtatgtgaaataaatcacaccaaaaaaatgtatttgaaatgaaaaaattccccgcctctgtaatttaagttttttagattaaaacagctaaactcttttcattaatttattagagatacaagatattgttatttgttaccaataccaatatgtaaatttttctgagtaattattataattagttgaatttggctaccatatgccaattttcaacacataaaattcttttaaacgtgaaaattccaataatctaagagccaacaaccacgaaaattaaacctcgttttagtctaaactctaaaatgagaaataattagaaaccaataaaggctcttaaagaaagactaggtcaagttcaaagcaagttttgctttgtgtggtggtcgtcgtctctttctttaaacacacttgtttttttctttttcctttgaccactccaatataaacaaccaagaaccagtgttcctcgtccattcactctctcgtaatcacacacacactcactcatacgaagccaattgttccacacaaattggaagcgacgacaatggagccgaaagagaacggctcagaattgggtcagaagatcattgacggaccaacgaatccaatggtcacacctttactcaatgatctttatcaattcaccatggcttatgcttattggaaagctggcaaacacaacgaacgatccgtgtacaacacacaatctcttctcatgctctgcttttgatgttgaattctgaatggttttgtatatttgaaattgtttttgtttccttttcagtttcgatctgtattttcgtaagaacccatttggtggtgagtacactgtgtttgctggattagaagagtgtgttaagttcttagccaatttcaaattgactgatgaagaaatcgatttcgttcaagagtgtttgcctggatctgaggtatatcaaaaatctgtttgtttttagattgttattgattaaagtttggatttttaaatcagggttttatgtttgtgattcaaattaggaagctttttgtgattatcttagagggcttgattgttctgatgttgaagtttatgcaattccggaaggatcagttgtttttcctaaagtacctctcatgagagttgaaggacctgttggtgtgagtctctttgtctctttcatttgtgaagattgtttaaggaatagttttcttgaatgaatgattcatcagttgttgtaaaatctccataggttgttcaattgttggaaactccattcctcaatcttgtcaattttgcatctttggtagctactaacgcagctaggcatcgctttgttgccggaaaatctaagagtctactcgagtttggtgctcgaagggctcaggtttcctataaatctctctcttgttttttgatatattgccttttgtgttgttctttccatctctgtctgatgttattagtgttggaatcttagggtccggatggtgcaataagcgcatcaaaatattgctaccttggaggttttgatgcaacaaggcaagtcttgctttttgtttttgttgatctggaagtaggtgaaagggaatgtggaaatgatgtgttttgtgttgttgggtattttgccaatgacagtaatgtagcagctggaaaactttttgggattcctcttcgtggaacacactctcatgcttatgttagctcattcatggtcagttcacttcagccaaaagtttcaatttttatgtggaggttacatacttgagttagctagtagagacgataacacaaagtttcgtgaaaataagatattcttgtcaatgcctttgttgctataactttattagccatggttctgatgcacacttaatatcctcgctcataacaatatcacaaaagcattttcgatataattagttaactttggattgcagagtactgatgagattgttgacaaagtacttcgtagtgctgatgggaaaaccacgtgcgaggattttgttagtcatgttcagacatggttaaaaaagattcaggtttgtttattgcacattttgctcttcctcttcctgttttctagtctcaggaccattgttctatttctgcttcaaccctttgcttgaatctttgtcacagtttttcttatgttttgtttctttgtggatgacagtattcaccatctctaagtggcattttctctgagacaaatcaaagcgagctagcagctttcacctcatatgcactggcattccccaaaacttttcttgccctcgtagatacatacgatgtgagcattaaacaccatagtagatagctcatttgagccttaggatttctaataaactcttatattagtgttttgctgactgttttacaggtgatgaagagtggaatccctaacttctgtgcagttgctttagcactcaatgactttgggtgtgtaagaatctcttatcaatacccgatcgtctgacttgactttgtacttcttcaggatcatatggaatttgagatgcaattgatgtttattgtgctgcgcagatataaagcattaggtattagactggattcaggtgatttagcttatctatctagagaggccagaaatttcttctgcacggtagagagagaactaaaagtgcctggttttgggaagatggtcgtcactgctagtaatgatctaaatgaagagacgattgacgctttaaataaacaggtgactccctaacccactctcaaatgccatgcccccgaaagattgattattattaagcagtgttttttctttcatctctatagggacatgaggtggatgcttttggcatcgggacctacttggtcacttgctattcacaagcggccttaggttgcgttttcaaacttgtggagataaacaatcagcctcggattaaactttctgaagatgttacaaaggttaaaactctctctctctctcttggtgttctgaacattcaatgtcacattgcacttaatctgattatcattctgattcgtttaggtatcaataccgtgtaaaaagcgaagttacagattatacggcaaagaaggttaccctctggtagatataatgactggagagaacgaaccacctccaaaggtaaaacgaaagataactctctcaaagattttaatctcattaccttattgcatttttacataatatctttcttgatatcaaaggttggtgagcgtttactttgtcgtcacccattcaacgaatccaaaagagcatatgtagtgccacaacgtgtcgaagagctcctcaaatgttattggcgtggaagtgcaggtaaagattttccggtaccgtagagttattaatgacaatgcttttcactgattattgtttctctataccaatgaagatgaagcaagagaagtattaccgcctttgaaagagataagagaccgttgcatcaaacagctcgaaaacatgcgacctgatcatatgaggagattaaacccaactccttataaggtatggttttatccgacaaacatgtttttcagtttctgagaaatctgtgtaaatgtttttttctctcatggtttacaggttagtgtaagcgcaaagctgtacgatttcatccacttcttatggctaaacgaagcacctgttggtgaattgcagtgacagaacaaccaaaaagaagaatctggttttggtttggtgtaatgtatataatttatataccacagcatcacaaatatgcatttttttcacttttagtttctttttcttacaacattttgatgatctctcattgtcgtagtaagtttcattttcttactgaggaaagaaactctctgcgttcactggaactttgttttcaactgattcaataagattttatatttacagctgtaaacatactggagactgtaaaaacatttactcaagtcaacgattttggatcaggtttagtttcgtcatatggttgacaacttactgttgcaaacggattggtaagcagttgagttaattgagttttttctagcagagatttgaagaacattacctttcttcaaaaacttctttaggcgttactaggacgtttggggtggacctagtcactaaccacatattcaaaattcatttccaaaaagatgaattatggaatatgagaatagaaaaatacaacagagtaaatgaggagtaaaactttattacagaaacttaccaaacagtaaaaaaaaatatggaatataaggaaaccattacttaacgaaaaatcacttaacaagaatacaagatgactaaaaatgacaagacgataatccatccaaattgaggttaaaaacaagtgatagttttggtcttatacaacagagttatacaagtgtaactttgaattcttatggtctccaaatagccatggcttcgagggcagggcactcgatatgggcgtgggttttcttggatgaaagttaaatttgttgatataaaagaaacacatagtatacacaaaactggtcgggaccaatactctttttttttttggctccgttcatattttcaaaacaacaattctttagtgaaaattaatagattgattaaagaaaaaaatgttgagaaaacatgaactttcatattgttgacgaaaaaaacatgaacttttcaaatgtcatttaaatcctaaagtttagtttgacttcttaaaaaatagttaatttagttgacttggccattccaaacatatctttaagtttcccttaacaatatcacgaaaataaaacagccctcgatgaaagaattgtttttgtttatttgagtccctcatttaacctgtttgtgatctgaattaagcttacatatacaaaatggtccatgatcatttgttttgaagattttctgaaatggtccatgaaagagttttgtttccaagtcttcggataatttgtctagttacaaaatggtcctgcatcatttggaataatgtatttatggcattatctcaaaattctctaaccattgggccagtacagtatgccctttacagatctaaagttttattatatgctagtattattataattaaaattttgaaaagtttcaaaccaagtttcgtgtgatagaatgtttgtgatttgttattaatcaataaactttaagaataacagaatcatcttgaaattctgattggtcgagctcaatcatattcggtgctgaatatgaaacaaaaaaattagttggtgtggttagctgacatggttggtacgattttgttcaacaaaaaactgcactgaaattgtcgattagttaatttaagtagtagaacaataataactaatttcatagtactttttaatccatatcaaacgttgtaagaaataaaattctaaaataattttaagcgtttagggcggtaagataatctaccaaaatgcatttgatgtttttggttgaatattattaaaacggagaagacaaaaaaatgagtgtggttgtacctgtgtggggatagaattttatcagtcaccaaaaacataaaaatgtactaaagaatatgctaaaagatacacaagattcgaagaagaggtaaaagtagagctaaaagacacgacttttctgggctctaaaatctgttaaaaagctttcttctttttctgtgcaatttcgtacttctaaaaacattcctcctacaaatcttatatttccaaatcaacaaaataaaattaacttattccctgaaatattaaaatctaaaaagttaaaaaaaaaaccataaacttcttcttcttcttcactctaactttacccattcgtaacgtccttctaatggcttctccttctcgaaatcgaaattgtacctaattaaaaaaaaataaactcactcttaattttacctcaaaatcaattttaaattatgaataaaaaatatattatctataaaaatcaaactcacaaaataaaataaaaacttacttcttcttgaatttttctttgagttgtttctcagcttccacaaaaaaatcttcaatttccgattccgttggcatctccgtcatcaatttcgccttctcctcctcctccgccgtcaccgtctcctccatcgttttcctcccgctacaacaacaatctaacgattctttaaccgccgattcaaattccgatgaataattctccatggatttacttaattcttctttctcctcctctctcagattttcaaaaagcttcctcttcgtacccctaaaataactcacaagcaagattctaaatttattgaagagagagtcaaataaataaccgggaaaataataaaaccttcaaaattcaaatcattttcagttttttttttaacactcaccgtcgatacgtcgacgtttcagtgtcaccatctttatcttcctcctacaaaaatttcaaaatttcaaaaaaaaatacattaacattaaatgatacatatacagttacaagaatctagaatcaacaacattaaataacctccagatgtattaattctttcttcttatattcattgcttccactacaagacgacgaaactccattatcaccgacgacggagacagagcttgatttttccgatctaacataaacaattctccggctccgtagctgcatatacgttgacgaaactccagcttctacaattcctttagcttttctatattttctcaccatcttcgatttaggttacgtgtgcgtgaagtcacaatctctgtgagagagagagatatgattgagaggatgaggaagaagaagaaagaaagatgatgaatttggttttgaacggtcaggattgagttttgtgctgtgtgtgatagagaaatggcgtgttttagtggtcccgttacagtgacggggaatctttaacggggaaactggaggcgccgttatttggatgttatggagttacttatgccgatggtttgttttattgacacgtgtcggttataaacggtgacttaacggaacgggaggcgtaataattgtggtgtaactaactattttaaaaaccctctcatctattggtaattcacagatttgccattacgcgaaaccgtttaaaatgttttaaattataattgacaagctttttgtatagttgggatgaattttatagtttaggtaaaattagaaagttcatattactttaaaatgaattggatagagactatatatagattatgtgtatagtataggtggattgttacggatagcctaaaaactacgtacctgtgagtaaaataaggtaaaagtaaaactgacactagaaattatatttttgttatccctgcgtatttgcttagcctgatgtcaagttgtcaacagcacgtgtcgatcgtgatatattgggcttaataagtcataatatagtaaaggtttctaagaactaaacttggcctccatcacttcccatgggccttgtcagcctttctatgttttgtttttgtctcaaagcatgaacaaaatggagtggcgagtgcattcaaattaccatgtcttgctttaaaaattaaaaatattttttttttcactgaaagataaatatatacttcataatttccaaccaaacatacaaaaaaatgtggatcaaggacaatcattctagatcaaccagtattacactaggcatttttttcttcctcaaaaagttgttttaaccaaaaagaaaacctagttgctacatacgattaacggcgatcattttttgttacgctcttggcaataaagtgagcatcaagattagatctccttaactcaccaagcaattttcaatccaaaaaattccctagtttctcaatcaaaagaagggactgaaatttacatgaaggtcatgcagacgacttttgttttaattgaataacataaaacttttactcactttacaaaaaagtatgaatctataaccctagatttataaagatattagaaaactttttataaatcttaaattaataacaaagaactttaataaactttttaaaaatcttgattgaataacaaacgattttacataatcgttaaagttcttttaaaatcataaaccaataataccccctaaatatttaatttatctcctcaagtgttgcgcccatgttatgtaaaatttcatccctataaatacatcagatggtccaagaggtttcatgcatcaatacataatacattttcgccttcgactaaatattataatttagcttctttttttttctaattctcgtctcggtttttctagtaatggcgacgattaatgtttacgtttttgcatttatctttcttttgactattagtgttggttcaattgaaggccgaaaactcaccaaattcaccgtaacgacgtctgaggaaatcagagctggtggctctgtattgtcgtcgtcacctccgactgagccacttgagtcgccgccgagccacggggttgataccttcagacctacggaacctggtcatagccccggtattggacattccgtacataattaacggagaggaacaatagcatcgtctatgtgattacatgttgaaaatatgattggcctggtgactttttttttctgaatatgtatttacgtacagtttcgtcatattcagtttcttgcaagtgtgattgtaataatatttatttgattaaattaagattgatgtaatccatcttattttaaaagcacatacatttttttatcaggttccaattttctcatatatttttctatcgagatgtgtcactcgcttgaactaagaaatttttctatcgagatatgtcattcgcttgaactgaatcatacgtaactcgatctaatcacaaaccgatttaggaatagaactatagaagcaatttcgattacttgtttatgtcttcaaaatctgtacgtagaacgaataactatctttgaaataatttggtacagatattccatatctgcgtttcaaaatttgagccagacattattttgcatggagaaaaacctaaaagtttgtattacgtaatattagtcactgaaaaactttagtttgtttgttaaaagttttagacggatgttagtatttgagaaataagcaatataccaagtaaaagatggttaagaatttagagacaaataacgaaaactgaagctatatttccattaacgaaaaagtaatcatgtatatccattaacataatctgtatttcttttaactaaattatatatttatagctactacttcaaaaattaagaaaataaaaaatatttccaaaatactgatttacaattctcatacaaaataataattaagacagtcaagaacctaagagtatcattaaaggggggatattagggagatattaggagattcttagattgtaaatgattaaatttaaatgttaattgagcaattttgcttagaggccctctaagctaagagatcctctgaagtaaaatgtggtggtgacgtggcatgatttggttggttggaagaataatattaaagccgaattttttttcttaccgttaattcttctactatgtataataatttataatatgatagtagaaaacgaacgagatacttacacttactttgatgtctctgaatttgtacaaccggaatcaactagaaatgcacaagtggatttcacctattctacatatatgccttcaaatctcgagaatatattggaaactcgaactcgaattcgtaatcgacaagcacatcaataattgaatttgatttggttgaatatatatggaaattttttagcagaaattaatagttaaattttatgttttcatgtatgttttaattttttgtatgtcatctatgtattgaatattatgagttcaataataattaagtttttatatattttaatttttaaatatattttttttaagaacttcaacttaatatactactattgagcttgccaaaaaattaaaaccttaccaaaattcttaactacaaaattttacaaagtttacaaattttaaaaaaggttaagggctcgagaattttacaagatcataaagctctactaaattacatgaaacggtctagtctcctttaatctattatagaaatgcacaacttgagcttgaaatggtaggtaagctatacatgtggtatttctctataaatttgtaaaagctaaccgtacaaaaagaaaccaaatatcatgggatttattaattgaatggtctctccttatattggaccaaaaagcgttagtccaatgatggtgagtgatattcggagtgttcaaaagattctctgtctagcagctataaatgtttcgtaggcttcaacaaccagtaggattatcatttcgctcagagttcgtataatttagtaattagcaggaattctttttgttggttcaatatttgtcaatagtagtagtattcttaactaaattatgacacaataatctatgttttaataaataaacttgccttgatcaagtaaatgacatattaatctatgttttgtaacctggcaaaacaattttaaaatgatatataaactacatttgtatgactaattttcaaagtaaaaataaaaaatcccacaaaacaaattattgtattaataatatagtctgtattatatgcataaatatatcattaaaatgggtcaaatatattccactatacatactttaatattacattatgttttcgcactttaatttcttttgattaataaatcaacggtagaagatgtacgacagccttgcaaatcaactttaatgcacaaatctatgagtttgtttggtggcgcatgagcttatcgtaaactaaacatcttctcgcttaatattggtatatgttcggcacctttagcagagctatggggagtgtattacggtctctatattgcttgggggaagagagtggaacggttggagttagaggtggactcggagttggtggttgggtttctaaagacaaggataagtgattttcattcgtcgtctttcctggtacggttgtgccatagctttatctcaagggactggatagtccgtatttctcacgtgtatagagagtctaaccgtcttgtcgatgagttagctaactatgctttttctttgccattagactttcatacttttaaggcttgtccgccgtgtgtggcgttgattgtggatgacgacatacgaggaactacagtttctcggaatgttcgggtgtaattttttcattttatttttaataaaaaacaggaagaaatccctgtgcctcacaaaaaaaaactaaacatcttctatggcctcctcttcatttcgagtagccaactaattcttttttttatctttatttttggtttgttcttataatcattaagattttaatctactgaataaaattttcattaagtaatagtggtgtacagaaactaaagtgggatccattcaagggacttccaaaaaggcaggagctaattagaataatgtttagattccacctcaaaatagatgaagtgtaactaaaggtgcacacggttaaacaattaaaatgcaattttattacaccctaatagcacttataaatcctactggaaaagaagaaacccaataaaaaacaaaacccacactaagatgagatatataggtgtattatgaattgtccattttattattgttaatatcattattatatatatacatatacatacatatgtttataatatagagagagtgtttttaattatttcatttgtgtggttacatccaaatatgtttgattactagtttagggtggttattattatgattaagttaatttctgtttcgttttcttttacatggatttttttttttaagattcattgtagagaagagaatggtattaacttgttgttttttgtctaaaataataaagagaagacaaaaggcccaaaacgattgaaagaagcaataggggacagcgaccgtatgcaagatccaatagactataacctgatgcttatttctttacaaatttttatcaagtctcatgcctatgagcctcactaatttatgtaataaaaactatagctttagccataccaacttatatgatgtcttgttttataatttccaaaaccatcacatcaaaatttacgaattatgattgcaaatttttggtggaatttcaagtggtaatcaacgaagtttatattagaaagcttgaaaaaaaatattttatttaaaatagttggaggtttagagtttaggatggttagagcaactgcatcgctagttttttaatagaaactttaattattaaaaacaagaaaaataaataaaaattaaaagaaagatgagagagaatctctaaaaatcgtaaatcaaggatcaatcctataaataaagatacatgtgtgattttattggtcgtttgcatatattaaataattagaatataattatagaattacaatattattactttttgttttttttagaaactctcacaatccgaaacgttggagttgctctgtcatttcaatatggctttgctagtaaaaatgttgtgaagattaattaatttaatcatctggactctttagcataagtttgcaaagttgctattatcaatactttaaccccatgcaaaagattagaaattatcctcatcactacttaatccatatctttgataaaatgacatatataacatgttgaatcacaattttctcaaaatttagaataaattgagtcactggctatagaggagatctttccataagagagaccattacaaggaccacctatattttcagtacaagcgcaagtttagaagtttaaagaactaaaccattttatgtcgcaagtaatttttggattttttcttttggataaattagtgtagaatggattattttcagtggaaacatgttgcctttttaagaaaacaggaaccgctaaatacagtaactcatacatagagtgaggtcttagcttagacaatgagatgatacctccgaaaaatgaaaacctctttccctctttacatgttgtcaccagacaaacggttgtcacccttcaaaagtcattctatggtattttcaaatctttttgtttgatatacttacgacgttcttaacaaagtttggtatggtatagttttgtattgattattcttcggatacatacaaactaatatactatcatgatcacatcgaactatagttttcatacatgttgatgatatttgattgttggtaatgatttacctaccttgggacgttttaaaagcttttattgaaagtttttcatgttaaatatttggattaacccacatttacactataactcagctatgtgattcatgtattatcccaatttatgcagacgaaagtagcacaaatatacacaatggaaggccacattttgtgtggtgtcattcttaaagaggtgtccatgtcaaatgatcttattatgatctaataatgatatttttgtttatcgtagaagacaaagaaacaaacgacggcgtcacattcttttcctgatcgcaaagtaacgcacaatattggcagtgggtacatgataatttaaatggaatattaattcgttaaagcttgacgttatttataacgtttcatttcaaagaaaaaataactattataaaacatattatgagaaattaattcgtcaaaatcaaataatttggagtcttttagtttagctaaagaaggaaaaggagaatattagacagggaggcaaaactaacatgcaaatgcttacaactttccctgaatatcgaacattttattgcggcgaggctgaacattaatattagccatcaattaatatcataaataataggtctagcgaaaccaccactactttttcagttttcacatgtttatgtctcatcctttcttaaaacaatatttcactttgtattattatattctcacgtatcattttgtttccatttctcacatattaagtatgtattactatccgtgttaatagtttaactggtctcctagttattcattctataaagtcccgtcaagttcagggatgatggaaaaatcaagggctacagagaacatggacctaagacctgaaattttttgagtaaaaattatgaattactactaaaaatgaaaatatggtgtaggtcgcattctctctgttaaaggggcaaaataggtctctaacccatgttttctttttatattttgttcaaataatatctttaaattttattagtaacttccaaattctataatctagagttaactttaatcttaactctacaattcttaactttaatcaccgccttaagctttggtagccgagagagtgtataatgaaagtttgaaccaaaaaaaggaggaaaaggaaaaaaagtactgtaagaaacagataataagacaaagaatcccaaacaattttttcttttctcaaacaattaaaactcttgttttttaaagagaaaaaaagaaacgttatatacgaacaaaaatgtcaccccgaaaagcttttaagctctagcatatttttgttatggtcatgcaaaatttgcggtgaagaagacaaataatatatttttaatataaaaccatctataggcatcaaatactctgcttaaacccacatctagattcacatggaataactaagaacaatatgtcattcaaataaaaatcatatatatactaacaacaattttccaaagttaaatggtacgagaataaagtatttatgtatattataagtcctagattacaatcatggggtcttgcatgctccacgaacagtaaaggtacggtcgttttccatcaataacttagaaacatcggaatcaatcgtttaagtccactttgtctttaaatagccacagattcaacctcaaactctaaatcattattaaacctttcataatacacatatatcatatatattgctactactcacgatcaaagacttttaaaccttatttttatatatttgtagttttggatatggcaaagacacgtcgtgtaatttaccttttccttactatagtactccttttctgcgaactcatcgacgaggcgcaaggtagccgttttaggtgtcatcactcagaagattattcatgtaagaaacgttcaagccatcaccatcatcatcatcatcatcatcagcagcagcagcaccatcacaaggacactcccccagaggagcttcaaggaagcatcaagacgaggaggagcaaggatatttatggtctcaatgctttccggtctactgaaccaggtcacagccctggtgttggccacttgatcaagacctgatagaaaattgaatttattaatctggatttctcctactctttttcccttgcctacattgttccatcaaccaaaggttgttcactttggagacctaattcagttatgcatgagtcatgctgttttctcatattgtaaatagtataatttggtttggtctcttaataatggttgtcgcttcgtaatttatgtttccattgttatcttgcggttctaatatatatatcatagccaaacagaataacaattaacaaataaaaaaataaattattttatactcttgttttttggtaaatatttatgctcttgggagatgatctttataagaatcatctattttacaggtttcaaaatttgcgttaatattgcagctacattaactttatatgcgtccgatatattttcttgacgtacctgtaacgtgtacaactagtgtctagtgttagaattaggcacttagttaggctaattaagtaaagtttatagtacgtaaatttcattgggttaactaagtactgtgttacaagtaccaaatagatatttgttttatcatttattaattaattaataagaaaatatcttgcatgcatcatcccttggattatgataaatggtaattgattaggtatatatacaggcaatattgaagaatcaacatccacgaaaataaaaaaggttaacacaactcaagatgattgattgtgtgcaataatctttgataggaaccacaaaaggaagggcgtgtatcaaaactcaaaagcatataaatatctaactcgagtaatcaaaaaatatatctaaaaaaaccttaaagttaaggagaaaattataaaaaataaacatagagaatcttaaaaatgcaggcacaccgttcaggaccggtcctagttgatagatcaaaggtgtgggatagtagtttaggattcactgggctttattttcgtatttaagcaagattattaaaaatgcaaatttaagatattagctaaaaatattaaattgaaaaaaaaaactaaaggactgttgacagaaagaaaattagatgtcaatatactgctttactaattacagttaacagctgtttttttcttccttctaaaactttaattagtgatggaaatcacaatcattgtttacaagagacatgagaaagaaagggtatgtatgatacaaaaaccaaagttgtggacttataatagcttttatcgctagcaggtctgcacaattattttgttcacgatgggtgaaagtaaatcttgagttcatgaaaccacttttccaatgttgtattgtctctatatagtgtttgagtcgaatattattgatgttcgcattgataacgtggttgatgattttgttatcaccttagaatattagagagcggtatcctagtccccatgaaacctatattgcccaaataagagccgtgcttcctccactgtgttacgtccttcgaatacagtgtttttcttcttatagaaactaacacgtttatcaactaagccggaaatatatttatattattctttacagcaacatatgtatatttctgttttgtaacaagattatgataaatgtcagcaaaaaaacgttaccttaggaaatgatagtggaatatagactttttggtgccgtgatggattgactaacgatatctaaaaaaattcagaaatcgtacctaatattaaaatctggcacctatctatttctataggatatgcaattattgcaatttttactttagtttcttttttacaagttaatcaacaaacttcctaaatatctttctttagaagaaacttcctatacagtgtatcatattattttgttgtttcggttcctactccacattgtataaaactaaggttggttggctacctaaattcattagcaacttatcagacaataatatctcaaaacgcgttttaaatctaatcaaaaccaatttaacattacataatctgtttctcaagtcaaccaaaaccaaccatataatatataaccactaatattttctaaactggtttaacattttaaaaatacattttgtaaccaagcctctgttagtctgtttaatgcataaaaatttaaaagtaaagatacactttttaacattttttcttttaattacttatttttgaaaatgaaaataaaattaagatataacctctatttgatatgtaagatcaggaaaaaaaagatagatattagccttagattggaagattcttactaaacattgtggtactggttgaaagatcttgtttcaagatcgtttacattataactcatgtataaacctgttttcaccattgttaatctctctacttagcattataaacactgaatgattgtgaaagctacacaaaagagggacttatataaacaagaaagtggtaatcgtgttttgagatcatactatcatcttggaatgttaccgagcaatgtatttgtagacggtgagctttgtgcacttaaccaaggatcttgaactgagatgggtgagctatcgctaatctcttcgacggatgcgaggcaatcaggttgtttctgagggataacgactcttctgcttcctattgatgattgtttaactgatctttcgcttcctcgatcagatgaacggagagaaccggctggtgaatccaagctcatgcttggaatccaaccactgagtcttatctgttcaagctcgtccgctacttcggtcattgtcggtctcatgtcactgtggaaggctaagcatcgaaatgcaagctcagccaccgtgtgtatggatgagagagtccatgcgtcgagatccaagtcaagaatcgggtctattatctcatcgatacaacctgacccgattttgtcaacagcaagagccgctaggttgatttcggtatgtggacgtgtgaaatcaacgactttcaatcccgttataatctcggcaaggacgactccaaagctgtagacgtcgctcttatcagagagatgaaagcattgatggtactgcgggtcaagataaccaggagtcccttgaggagccgttgatatgtgagaagattccgtcattcccagtctagagagtccgaaatccgcaactttggagttgaaatcataatcaagaaggatattggtagatttgatgtcacggtgatagatcggtgggttcattgaagagtggagatacgcgattgctttagctgtttgagtagcaacagtgagacgcaaggtccatggaagaccactccctctatctctttgtagatgttcagatagagttccattcggcatgtactcataaacgagaactggatcgccttgttctatacaacatcctaagagacggacaagattcgggtgactcacagaggaaagaagcttgatctcattcatgacttggtcaagactttctgaatctctatgtctaagtcttttgatagcaacccattcatcattttggagctttcctctatagaccgtaccatatgcacctattcctaacttctgcttttcagagaaaccatctgtcgctttctcgatttccttgtaagggaaaaaggcgacactcgagttccctgcagcttcagacaaaagacgctttgcgcttaaatgacttctcaaaggagtagaccgtctccgcttacaaaagaagaaaaaagccaaggcagctagtaaaaacgctccaccaacagttcctatatatagcaaatgaataaacttagtcaaagatccaaaatgaacaaaacattgaaccaccaaacaaacactaaagcgaccattacctcctacaatagtaataagattagatctacaatgtctccagacgagcttggaaccacggcactccggtagtgctgcaaagagtatagagtaaacaagttagcaaaaacagcttcgcgaatttcgaaaacaagagacgttatgtacttatgttgaaacaaagactagatttgactaacctctctggcaagggttggtgtatccgtcaccgtggaaaccgtcaagacatgagcaccggtgtcctgcatatccatgaggagtttcaacgtctgtacaatcggtgttagccgcgcaagttccgctctcgcaacctcccttaagccaccaacctaaccgaactcgctcaaactctaacgctatacccgcattcacacctacagactcgaaagctatcgacgagaacaacaaactacacgagctgttccttaatgtcttcatactgaaaaacttagctgagttcttcgaactcgaattactatctaaagaaaaacaacttatgtttccagtagcatcacaacttttgagtttcagcacattctccagaaacttctgcttgatagagcaaccatcggtggtacggttacaattctccatcaagaaactgttctccgacgttggtgcgaaattctcgccgaaaagcggattcatatcttcaatcttccgagtacaattgtgagagagaccgacaaatatactgttttccgtcacgttttgaacggaaaagtctccgatcatcggtttctccgccgcagagcaatcgaatcggatcgaacaaccgtttgaaaacccgaaaggataaggcagagtcaatccaccgcatcttccgttacaaggtacggtgaaattagcagaaactcgtcggaaaatagatcctccgattacgattatgaaaaccaaaatcaaatccaacttatgagaaatcatcaccatcttcgttgaacgttgattgaaatcaaaaatcgatctcaacattcatcaccttcctgaaaccataagaaaattcattcaattctccagtgaagctgcgacaagtcaacagctaaaaccctaagacctcgagagagagagaccacttggaaattggttgagctattaaaagctctcaagcttcccaacggtacacaccaaaataaatacacatagagaaacagagagagagagagagaaactgattcctccattaatggccgatattatagagtctaattagtgttttagatttatcaattaccttcttcttcttctctgaggtttctctttatcttcttcatggattcaatttctgtttattctactttaatcgtcaaaagaagctttgaaacttatttgttctccggcgaagaagttgatcggtgatgatcggaaaacgaaatctcccgtttgaattataccgaattgcgaaataacaatcagagtaataaattggttttgattaaagacgaggaagaagaagaagatacgtgcccagtggatgtctatttttttgtttaaagacgaataagcccttgaggaaaagcgtgggaagattaaaatgacggatatgtccttatcatggtcaacgagcaattgggatatctttgaccgggtttgagttttttttttctttatttattgatgatgcgtgtgtgagtggacagcataacaatttgatcaaagtcgttttgttttcattattataaaaagaaaacaatgttattagaatatacacttctattgaatcgaataatattgtttttttttgttgggtcaattagtcaactagaacaaaattgatgcaaatttaggaaaataatgtctgattgagaaaattggatcattgatgttgatcttccgaaaattcttattaacataatatttgagattgtgattatccacctttttcgtgagatgaaatttgattatgtattatgtatatatatatatatatgtacatgtacaagtttaattacaaacatattgttctatgtttctttattacatatatcatatatatatgtactcgaaccattacattggttagacaaaaaattattcaactaatttttaccatttaaaatgaaaaagatgaaaaattatttattttcacctgatcatttgcagtgctagtatattggtcgaacaatattattattactttgttgaaaagtggaacaatatctttagcatattggtggttacatttaagagtattgttgttataagcaaacagagtagttacgtaccaaatttgtgttgttgaaccgctcaaaccatcatttgtgttatctaaccaaatttggtcttttgtgcttcttgtcctaacaaaagtaaaactactttttttgtagaatagaatgatcaataagaggatatcaaattgatggatcaaaatcttttgagcattatctcatgttttgtgttaaatcaaactagagatcgataaccttgttttcaactgcacacacattcaattactgaaaagattctaatttcacaattactgacaagattctaatttgaaacgaagaacaaaagacggtaaaaatactctaaaaactcaatgtaaatgcataaaaacaaaactatgaaagcgaattttaaataagctaaaaagtgaaaaccatatacatcaattaaaaataaaatataagtttagtgtgaacgtgttattcgttgtttcacgcaaaacccgtttatatgtcagttcgttggatttggatatcgactctagtcatggtccggtcacgagccttgttcgttatcgacttacttgccgtgtgagctggggtaatccatttcctaaatgacataaataccctcattacttgcacccattgacttctattcttttccttttcgagaatgataaatacgtgccttactatacacgtaaatgtttatatacggtaaacatttaatttcgctttacaatttatttttcttccatttatctataggattcgattcacatagtattacacatgtttcattttgaaactggcaatactcaattagaaggaatcactatggaatgtgactttgagtttgatgttgaccatgactttgaaagtgtatgtacgtgactcaaaattacatttagcatggaatttaaactcgtatctctttatttaatagcttaatatctctaacgaaacaactaaacgtttgatctgttattaaagattatttgtcgaccaattcattgggatctagtggtcgatcgaatgactatatttgaatcattctggtacatttttaatcatggttactgtggaatctttaaacgataaataagaatacaaaactttgatatttccgttataagacatataattaatttgttgtcatatatagttttgtcttcagcaatcacaacattattaaattatcatattgatcagtatgaaaaaggtcagataattattatcaattaatcagttttgtagacccaagctcaatgatttatcttctttcctctactttataagaaatttgtggaatgattagaataattggcaggaattccgctgatgagaggaaagacccaaactcaatgattaagactggagattttgtttttgtcccgaatgtacttttcaacacttgatttcttctcaatgttctcatgcggaaatttgggggaaattgtcaatgtatcattttttcggttgtcatctctagttatagtgttagatctcgtttttaatatgtctccgactaatgtttttgttatcatttctaaagcaatgatatttatgctcaaatgagcttattaagagaaatataaaactgaaattagatagctcattaagagctttattactcaaagaaactaaaagaggaaagattactttgttatcacaaagaacacgatgattcaattactactttcataaagatgagaaagggagttgttttgagacaactcttaaagttatcatcaaagttctcatcacataactatatatatgagtgatgagtcactatcttgttaatcctatttatatggaccactacatgagcttttaagttactcatgagacattatattgggctttatatggatcctctaatagttttgctagattaatgtgaatacgtctttaggaatgactagatcatgagcacgagataatcgtcaccgcttgcactaatatagtataagagggcaatggtgactaattttcaaaaatttagctccaaggtgattttggagttttacgctcatttacatttcagaaaaaaatcaaacaatcatgattgggtcgtgtctaaacaattttgcatacacatcaaaacaaacatttgcaaaagtttgaagaatgatactaagctaaaaagtgaaaatttccaaaacaaaaattagggactaagaaatgcgagattttaagctcacaaagagtacttaattgattgtgtttctttttttgtttatcttcccgtagatttcatgtcaatttccgaatgaacctagaaaatcaccaccatatttcctcttatcaaacaaattttccatccaatcatattgtctcattctaacttgagcgtaaaaaggtatttgaaaacaatttattttagttttctcggacactttcatgagttgaagacaaaatcagagaagtctccgaaaagacaaaaatggatcgtcagtttgtcaccaaacacctacatgaaccttacttgattcgctccaagtgttcaatcacttatcatatgatcaccaacaatccaaaaataatcgaagtttccataccataaacaaattccataatccaaaaattcgaccccttgacacacactgacacacactgacacacacacacagaaaatattcccgtagctatgcctatatgggcaacttcctgggctaatggtcccatgaaaaactgatgagctcatagtcaaatattatgcacaaatgggcttatataaatgtcaacttcaaagcttaccagaaacccaacaaatacacaagccctgaagtaaaaaacaaaaacaatatttatatcaccgtaaatttcggaccaaatcagagaattcagagtgtttttactgttcatggatcccacgtgatcagacagctcaaattccgatctcgtaacgacgtcgaataagacaatttcggttttgtccctaatcccatcttaaactgggtcccacgtttttctcttcctcccaaaaagcaaacttaaaaccaaaaaaatattatcggacaagattccagctactagtggttctttctttcttcttcatctttttctcaatcactttcttcttctccattctccttttcttttggttctctctcccacttgtgaagaagctcctcaagaagaaccctaaaaaaatgattcttctttgattttgtgtatttttacctgttcttgttggtgtttgtttgcttagttctgaagcaaaagctagggtttttcttcttcttcttgaaaatgccattgaaagaagatgattgttgtttattcgctgaagaatacgatggtccaccattatcatacaatatcccttgtgctgttcctattaacgtcgagaaaatcccagtcgccgccgttgtttctccggtttgtatttccgataacatgtctttccctgtgattcaaccgattttatcagtagagagtaaaaagtttctgatagattcggtttctcctacttctgttatagctaattgtggatctaatcagcttgaattggtttctgattcaatcactgtttctcctacttcggttattgaacatactgaggaagaagaagaagaagaaggtggtgatggtgaggattgtgaattgagtagctctggagagttattgttgaggtcttgttcagtgaaagagagtttagacttgaatgagtcgtcttcgaatccgttagtaccggattgggaatcgaatgagtcagttttgagtatggattacccgtcgtctcgtgttactggagattgtgttagtgagactaatggtgatggtaagaagcaaccagttgttactttcttgggtattgcttctgatgatggatttgaggaagaggagagttgtagtaacctgaggcgggttcgggttgtaccggttaagaaacagccgcagacgaaaggtaagaagggttcttgttatcggtgttttaaagggagtaggtttacggagaaggaagtgtgtttagtttgtgatgctaagtattgtaatagctgtgtgcttagagctatgggttctatgcctgaaggaaggaaatgtgttacttgtattggctttcctattgatgaatcgaagcgagggagtttagggaaatgctctaggatgcttaagaggttgcttaatgatttggaggttaaacagattatgaagactgagaggttttgtgaagctaatcagttaccagctgagtatgtgtatgttaatggacaacctctttaccctgaagagctggttacacttcagacttgttctaatcctcctaagaagctgaaaccaggggactattggtatgataaagtgtctggactttggggaaaggtgaggaatatttactgttcttttgagttttgtgtcttagtttctattgtttcttatatatatatatatgatgttggggttctacaggaaggagagaagccttatcagataattagtcctcatctgaatgttggaggtcctattagtccggaagctagcaacggaaacactcaagttttcataaacggtcgggagattacaaaagtggagctacgaatgctgcagttggcaggagttcaatgtgcgggtaacccacatttttgggttaacgaggatggatcgtatcaagaagaaggacagaagaataccaagggatacatatggggcaaggttcgttgttttcgtattaaatctatattccattcgattgtgttttcccctttgatttaaagattgcaaactttttgctgctttgcaggctgggactaagttactttgtgctgtattgtcacttcctgtaccgtcaaaatctaccgcgaatgcttctggggaacaactctatagcgcaaatagcagaagcattctggaccatcttgagcataggactttgcaaaaaattcttttggttggaaacagtggttctggaactagcacaatattcaagcaggtatgagtctctttgctgtatgttgtactgctcgttagcgtaagccttaaaatctacacaactgaattactttctcgtttaggcaaagatcctttataaggacgtaccattcttggaagatgagcgtgaaaacataaaggtgattatccagaccaatgtgtatggttatctcggtatgcttcttgagggccgggagcggtttgaagaagaagctcttgctctcaggaacacgaagcagtgtgtccttgaaaatatacctgcagatgaaggtgcatagatatttcaactcctactcattcttgaaattcagtttcctgagagaaatttgtttatggaccagatcaatcatgaatttatatacatgtatcccatttgagtcttaacttgatttatgtgtatgagcaggagatgcgaaaagcaacgacaaaaccgtcaccatgtactccattggcccgaggcttaaagcattttctgattggctattaaagactatggctgctggaaatcttggggtcattttccctgcagcctctcgtgagtatgcgccactagttgaggagttatggagggatgcagctatccaagctacatacaaacggagaagtgagctaggactccttcccagtgtcgctagttacttcttggagcgggtaaataagtgcttcactatctcttgtgctctcaattttccattgcattgttcgttaatcgttacagtaagttattaatcttgaagctgctttcccgttcttcaggctattgacgtgttgacaccagattacgagccatcagatttggatatattatatgcagaaggagtcacttcatccagtggtctagcttgtctcgatttctcatttccacagactgcatcagaagagaatcttgatccttctgatcaccatgattccctgctcaggtaagttctgattttcctttttgtttattgttattcaagtcagttcgaaaacatttgaagacattttcttgtgtgctttcaggtaccagttaattagagtaccctcgagaggcctcggggaaaactgcaagtggatagatatgtttgaagacgtcggaatggttgtgtttgttgtttccatgagtgactacgaccaggtgtcagaagatggaaccaacaagatgttactcacaaagaaactctttgaaagcattatcactcatcccatctttgagaacatggacttcctcttgattctcaacaagtacgatctcttggaagaaaaagtagaacgcgttcctttggcacgctgcgagtggttccaagacttcaatcccgtggtcagtcgtcaccgtggttccaacaacggtaaccccactttgggtcagcttgccttccacttcatggcggttaagttcaagcggttttactcttccttgaccgggaaaaagctgtttgtttcttcaagcaaaagtttggacccaaacagtgttgattcgtcgctgaagttagctatggagatactgaaatggagtgaggagagaacaaacatctgcatgagtgaatactctatgtatagcactgagccaagttccttctcaaattgatgtttttcacagtcaacaaaagagtctaatgtatatggtaacaactttcttgtgtatagattgccacgtagattgtattaacagagtactcaagcatcagtttacaaaccaatctcggtgtactaaaactgttacaatttaaccgattcttcttttatgttacaattggtttttgtcaaaaatgtatctaatctgctcttctgcactcaacaagacattctttacgatccaaccttgttcttgcatttgtttgttcagtgcgatattatcatctcgagcagctcgcttactctctctagtgagcaaggtccaatcttgtagcgtcaagtctgaaaacgataaatagcttctcttggttctattggctccaagggatttacgtatgtaacatgtctgaacatatcaccaaaatgtgttatcagttaactactatgaacttactaaattgatgatattcagttgagtcccttacctgtaacaaactcgtgataacgtctacactgttggctccttcgcgcagacaaataacgatgcccgactaaatattttacaagtgttgaggatcaaaccacagaatcatgaggacatattagtagcaaacatgaaactcacttttggtattcttctgaaaccttgggaggaaagttccatggttatgaagtaaccatcatcactgcagagtgattgcatggccatcatcgatagtgtaggaatctgggccttaggatctaagcatccgattctgatgggccaaacccgtttgctacctacaaagaacatatgaaggattcagcttatcaacaatgtctggaaagtgaatagcctgaagacgttttcttgtttttcacctctactccctaaaaggccaattccttcctcttcactcacttcggcaggggaaggtacttgcctaaattcaatccatctttccagaataatttcaagcctatcctgataaggaaaagaaaaacttataacaacataaagtagtctccattgttcgagtctagttaccgagataacaaaaaactaccttggtcaaagtttgcagattgatatgcttgagcccttgataaatgccaaggagatcaaacgtggagaaaatcggatatagaacaaaaggtagacatgcctgcagtctagtacataaagcaagtcagaggattcagagacaaatctcacagataaagtaactctcaacggtactagattgagctaacctttggttgtgttggaatagcatatttagaagaaccgccagtaggagaccaaggttatcaaaacaaacagtttgaatctgaaaagtcacaaataaaatcaagccatgtgtgtgatacaaatgatagaaaagctcgagtaggttcgttaatgaaacctgtgcctttgcagagacttcaccaaggttatccgctacagcaaagcttcgatgtacagctgactatacaatgtcaaaacattggctatcaaaccaaaacaccaagcataaaacaaaacacttaagtcataaggaaaaataacaaataggaaaccttacaccggttgctaagtagcacgacaggctaatctgtttagcgatgttagcgatggaagctagcaaaaggaagtactgagggaatactggagtcattaactcaactccaatgcttagactgaagagtacagacgtcgagaacctaactctcttgatttagcaaaatcctaagagtatatgagtaacaaaaaatctccaaagtttcaagaactataatttagtgaagtaaaataccttcaaattagtgtcaaaagcagaagcaagactagcagtgtatatacatctacttaaccttccaagtccatctttcaaaatccagttaaaagcagcagatgaagctagtgaccgagattgtccaattcctattgctctaaacattgcctgaagcaacaaaaacaactcaaaatttgtaacaaacaaaagtccaagttcaagtctagaactgtgtcaatgttacctgagtggcaagaacttgtaaagcagagctgaaaactctgtgcaaaaacttccatttgacataacttatataattgtcactgacttgtttcggtaaaaagaagtcttttgcagctgaagaagtaagtcttatcaatttccagaaaccatcatcgaggccaaggcaaaacgacgtcgaatcatcttcttcttcatcaacacatagcagctccaaggaatctcctttgatgaagtacctagaaactttgccagactttttgattataattggaagacgacgagctacgttactgggtactacgaggtcttcttttgaagctccttcttgcttgtaatcaatggaagttctcagagacttgacgaattttcttgacgaaaatttggggaaaatgaagattggatattgggttgatgttgatttacatgggtattgaaaaagtcgagagctttgattcgttgaatgcatcagagttcttagggttttagggaaggttttgcgttttctacttcttcttccttctctgtaactactaactcggttctgtgagaataatcgtctggccagtcccttttttgtaaagagaaagccaaaaaatccttgtaaaaaactgaaataatttttgttttttttttaattcgaaatatatggatattactagtatatctccatccgaacctattaattaccagaaaaaccatggttcgtttccgaaccaaaccatccgaaccacctttactctttatttgaaaatcaaataaaaaaaccctaatatttccagggatttcccaattcgaagagagattttttgacttcttctccttagtaaccgttttcgattttttgacttcttctccttagtaaccgtttcaactgcaacattccctatttctttaaatttaatcgatcgttcttcttgctttcaccagtatttccgttctatttccgattcgaaatcagtcatgccgcctaagacgcgtggaggaggtcaagggaaaagaaaggagatagaagcgccggcgccagcgaagacagagaaagttaaggcgccggctgagaaagtgaaggagaaggtgccggcgaagaaagcgaaggttcaggcgccggcgaagaaagagaaggttcaggcgccggcgaagaaagagaaggttcaggcgccggcgaagaaagcgaaggttcaggcgacggcgaagacgactgcgacggcacaaacgactgcgacggcgatggcaacgacagcggctccaacgacaacggctccaacgacggctccaacgacggagagcccgatgcttgatgattctacgttttatgatgctctgaagcatattccggctgaagaaactcaagagaatatgcaaactgatgaggtggaagatgaaaatgaaaaagaagaaggaagtgaaaaagaagaatcagggagtagtagccaaaccttgggctccgattccgattcagaggagacggagacaaacaaagaagtcgcgtgtgctaatcccgtggaagaggcggagagacaagatgacggcctagccgttatcgaggaggaggaggagaggagctccgcgagcgacgaggacgtcaatgtggaaaagtctgtggaggatgagggagacgaggacgagagagacgaggacgtgatagtccaagtggaaaaacccgtggaggagaggaccatagacgaggacatcgcaaatgtggtaagtattccatttcgtaataccgatctaattgggtaataatgcaattgtgaaatgtggacagtactagtaacattgggaaatgctatgttgatatttaggacgagagaaacgaggacgtgatagtccaagtggaaaaacccgtggaggagaggaccatagccgaggacatcgcaaatgtggtaagtattccatttcgtaataccgatctaattgggtaataatgcaattgtgaaatgtggacagtactagtaacattgggaaatgctatgttgatatttaggtaatattggcggatgtgggtaataccttatagtaatactacaattgtgatttatcagtagttagtactagtaactttgagcaatactatatagtaaaataggagtatctgtgtaatactggtaattacggggaatacttttaggaaatacaaagtaataatgtggcagtactatttacaattgagtgatatatgaataggagtatctgtgtaatactggtaattacggggaatactttttggaaatacagagtaataatgtggcagtactatttacaattgagtgatatataaatgaatgtttgtttctttcaggatatggaggaagcgatggcaatgcagccacttggtatgtacttcccggcgtcggagtataccaagaagatgaagttagcaacgaggtgttatatctcggaggtgttgaagaccttcgctgacttggaacatcctctaacgaatgttgaaaagaattattttatggagcatccgagtttcaagcacatctaccacctgccttccggatatacccacaagttaatggggatgtggatgctttttcttcgaacggcatctattgagaagaagaaggaggtttggttcgttgttaatggagttcccatccgctatggtattagggagcatgctttgatctctggtttcaactgcaaggcttatccagctaattatcagagtgctggtaatatgaacttcgccaacaggtacttcaaaaccggggtaattagacgtgaagacgtgaaaaccaagctaatggagatggaaccggctagatcaaaggataggttgcggatggcggtcctctattttctaacaagcatcattgccgtgcctactaagactggagaaagggctagtccaattgatgatttctgtgttagggctgcaagtgatcttacgttttgtaagacatttccatgggggagatattcatttgagtacatgttaaaatcgatctcacacacattggatcattttaacggtgtcgtcccgaacactcagtcaccatggcctgttcccggattctgtgtgccgcttgaggtaagtcttttgttttatccttgttacattttcgtaattgaagctaacaattaaatttcatgtgttttgtgtagtttttagcatttgaggccattccatcacttagggaaagattcatagaagaaaaagagggttcacatgccggttgtccaaggatgtgcaaggtgagtttcaagagaaccgagatgaaagggtttacccttgagcaaatcaaccatgtactcggaacaactgaggttagtatttcctataattccttgagcaaatatgagcaaatatgaatttatttctttctaatatttcattgtttattatttccataggtcattgagagtataattagagagaaggctgaagaagtaccccttttggctgaaatcacgggagtagaggatgatgttgataagcacgatgttgtagttgatagttggatgaagcgtcttggtcaagggcgtgaaattagatttgaggaggtgtacaacgaggatgtgcatgcacgaatggaagccccaaatgaagaggaagttcccacagctgttggaccgggagacccgacgttagttgatgtaatggagaagctccattccatcaatgacaagctgaatgaagctttgttggcgcttatggaaatggaggaaaaacaagcaacgttcgaagcatttatggatgagatgaaagccaaggtaaatctgggtaataccggatatactgttccataattggtaatatcgcgtaatactaaggtttaactaaattaacaatgcagatgtttcagaacccaccagatgaggaggaatcaacaatcaaggaaaatgcggctgctactgttgtgcccaaacgagtgacccgttcaacccgtgcaaggtctagtaacatgtgaaaactattcgtgtaacttctccggatttgtattttgatttcttgtactttgactttgttttaggatttcgcaagtactcgtaaaactatgtttggattcaattaatctattaggatgtcttatgatattgttaactgaaatacgggaaataccaaactgaacaaccatagtattaccaatcaaagagaagtcttacaaagcatagggaaagtcttccaagcaaattaacaataagattaaggaacaataggataacacattacttctttggatccataggattacggaataccactttgctcacgttcacaatctctgcacggtggactttcaattctttttgcatttcttctatgagatactcatgatttagaactttcttccgattgtaatcaacactctcccttaagctactcacctcttcttccatagccttatcccaaagtttacggatgtgcatacaatcagttctatcatcctacaaagtaccaaatatttatcaaatacagatctcgagctacaaaaactagaagaacttgtggagtattactcgttctaggcagtattaccaaaacgggaaatactctgaaataccaaatatatctagatctagatctacacaaacttgaaaaacttgtgctctacatcaacataccttaaacttctcgcattgatagtatctcttttcatcctttcgcgtctcgacaatgctaccaccacatggacaaaacttaggaatcccttccatcatcgcaaccatttccatttggtcaatggctctcttcgccactttcatatcatcgtagtaggggtctctctcacacagtctatccatggtagaaagatgaaagaaagatgagagatgtgagagaattcgagtcgaagagagagatgagagatgtgggagaagagagatgagggagaagagagatgagagatgaaagaaagttgtaagaagagatcgaaaaagaaagaggaaaaagaaaaaagtgaaatttttggttttggagggaatctcaaaatttgttaggcgccaaaaattttgggggaaaaccaaaaaaattaattccccacgtgtgcgccgttatttttgacatgtgcgcagcctttttacagcatagtatttcctaaggttttggtagtgccaatttctcaaatagtattactttccatgtttttcatgtttagcagtatttcctatatttacaatttgtttatttagtagtacactggatggaactttatcaatatagaggttaaaatattttgtgcaattataaattaaatatatgtagtaatatgaatttttcattttaagttggtgataatattaaaagtgagcttaaaagtataagggatatgttgtattgagtctactaaagataagttaaaaattttaatattaaaatttctaacttaattaagtataaatgattaataatacatttttatctgttaaaaactcactgtattcattttcattgaggtttgaggtaaacaaattcgaactccataacaccaacttagtattaccagtagtactaatatgacttcaaattcgacagaaacagacatgatattacttgttataaccagtattacaaaaaaacaatagaaacagacatagtattacagaaggggaaatacagtattacataataagtccataccataaaaacaacaaatcactgcagaaacaaagttaaaaactcatataggcgtattcccaaataataaccattgacacgattgccttggacgccttttgttttgcgtcctttgtcgttttggccgtttttccccggttgatggaaaccttagcatttttttccttcctttcttcggttttttagacagcggaactatcttcaacgcctttacttcatctggtacttcccactgcgacctatccggaacaagataaatagtcctataataggccaatgcccacaactccgcccaataatattttgtaaccaaatcatgtaactccaaacctcttctccgatcttcatcatccataatgttaatgaaagcggctaatgcatgaatacaaggatatttttggatatcgaaaaccttgcaactgcaagttttcaaaagcaagctcaccgtataatctattcctttgtcgcatgtgactacatattcacgctcgaatgagtttagctccaccactttcagcttctcggcaaaaacccacaaatcatgcaaataattctcgaccaaaggcaccatcttattttctaaggatccagacgcggcttccatccgatgttcattaaaccacccggagatttttttgatgatcgcatcaaccattggtattaacgagtatttccttgcgtttttaaacacattgttcaaagattccacacaattgcttgtgtctaagttgtatctttctccgggaaaacaacaccttgcccatttttctttcacggttgtatcctctaaatacttggtcgccttaggatatctcaacttaaacccgtcatacgctcggttgaagtccgccacgacgtagacccgacttaactcctgaaacttccatgcgagtacgtctcggttggtgtgagtagcatgacctttcacattttgggacaaatgccaaatacaatacccgtgatgagccgcggtatacacgttccgtatggcctttatgaggcttgcatttctgtccgtcatgaaaaccaattccgaagtatcgggtacaaccgtttttagcttctcgaaaaaccactcccaactagcatcattctcaccgtcgagtacggcaaacgctatgatgtaatggtgacggttaggatcttgagccgaggcaaacactagcactccgccatagccgttcttcaaatgtgttgcatccacaattaaaactttcctcatcactctaaaaccttcaatgctagctcccaaagctacgaatacgtactgaaatttatcattctcatccaatttcagataagtaactgtaccatcatttaccttcttcaacatgtataaataacaattgatatccttgtagctttcttccgggctaccttttaaatcataaatcgcatgatatttcccccttagcgctgtcgagtatgatactttcacacctaatttcgtctgaactagctccatgatgatacttggaaccggagtttccaactgtcccggaaaatgatcatgaaggagagctgcgactaattgggggttgccttttcttttcctgagcctactactacctttacttagccgagtgcaactatgcatcttattgtaccttctaatcgagaatatatcagtagtactaatattggacgctcgtaaacgccaagaacagctctctttggcacactttaggacatagcgctccttatccgacttcttaatcacataaccaaaactgttagcaaatgcagctctatccaccacctcgtgcaatgccgccttgttaggaaattcttgacgtaaggtcaacccaattccgtcttcccattcttttttaaacatacccggttctacagcaggtggcgactcaacatactgttcccccctatcagaattatccatagactcatcatagcgtgtttcatcttcttgagtcccgtgatcctccactattgcctcaagttgatgttgagttccttgttcctcttctaataagacgatgagtgcaccatcatccactctcatttcatcctcctctgaattcaactccgtatagttcttaccaacagaactattaccaactctagacaattgctcgggcaattgctccggctcgggcggtttagagatctcctccacaaccaaaacacttctccggttattttttgcggatgttacataaacacagacatcctcatcatcacaaacgttcatttcttcctctactccgaacaaccgtggattgtacctcatatgcaattttaccttatttccatctaatccaagcttcgtcattagcctatcttctaacattgagaaagtaatcttctcccctaatgtcttcatcatcacattatacatgcgaccttggaatttaaaatatatgatcacattctctttcattgtaatctgccaaaacaatacacatactcagtcaatattactagtattaccgattctagtacattgtcagtaatactagtactaattctgaaatattacatgtgtgagtaatactattacatatatgaaatactacgtgtctaagtaatactggtgctatttaaacatattatctatataaataacggtactactatagctagttcgaccagtattattttcgcgacaagaacaaatattcgatttgagttcaatttagtatgaatcagcatgtgaaatcaattgcttacccattaacagaccaaatgaagcctaaatctatacttaaacttctaatgtaggtgctaaaacacaataacccaaatctaattggattgaatctcaacatcctcaaaatatgtaattcaaagcttttgaagctctctccatacctggacttagtagattgatgcagcttgcaggaggagaaaaacgacaatgcggctcgccggagctcgccggaggaagaatcccgaagaagaagtcgagctcgctcgtgttcgagcttttttttttttcttttttcgttttttgtttttttttggtttcaaaatgttttctacaaatattaattattattcaaaataaattataagggtaaatttgtcttaacacaaatcattaagtgaaaagggatataaagactctaaagtggttttgcagattatttgtgccacaaaagggacacaagagatgatccctcgttctgtgaggaggaactaagagtaacgtttctaatgtattgggctggaaatgggccttacacacttggcccatttagtttttttttcttctaacatatggtcgttattgaatttggggttatttgatttttattcttttcttaaatgataacataaaaaccgaaaaataatagactaacggaggacaaaaaaaaaatcaataactaggcgatggtgaatagactaaagtgtttttctacacatgcaaccagcaaggttggtaagtgaatccattttatcaaaatcatgagggtgaaattcaatttcactatgagatatctctcattatgttttctagttttttagttattttgatttcaatgttttaaaggatataaataaaacaaaagagacataaaattgtacaaaacttgttaaaatttgtcatttggattgtctctggtggcatgttttctgctcgttatatatgataacaaataaagtaaacttgcaattttcaaagatatggtaaaatatatatatatatattgattgagaaaaatatgatatagtaagttaatatagttggtcaacattaagttatgtgcattttaaccatgtagttgttttgaaatatgtgtaatattattggaatatatgaatttttttctattatatatatgatttaagagattacatttagttgagaaaattctaatttttgttagatatattaattatattataaaaaagctaaattagggaaaacatctgttaaataaaaaaaattaaatccaactttttcaatcttgtacaacagatatggatatgcaactcttgtaacctgaagactctccttcttccccaagggagaccctcgtttgagtatgagtcatgcatgtgttggagtggtttattgtttggacactagtgactatagagtttccgtatattctacacttgaaaaagatttcaaaagaaaaagaatctctgtggagaaatagttaatcaacttctaaaagaaaaattgtgattaaaataaaagaaaaatttgtaatcacaatttttcttttatgaatatgtggttttatacttattagtgtcgttgtctttgcgtttttttgcaaaaactttcgtttggtatattgttcaacaaaattcatcttattgattggagaaatgtactcataagtatatcaatgagacatataatagaaatctgaataattgtaaaaattttaaaatgtcgatctgaacacctagtttagatgatgaagcctacatatgatacaataccactatctcgagtggtgtttttgtattttgaatattgtatgtaatttttgcaggaggattatggtgtcttcacgaagtagattgctgcttcacgtagttgtggaaaggagaaaatgatattcttctttttggtgttaaaagtcttttgtaataggtttgattgacttatgtgtgcttaccttggtttgtgaaacagtaacctatgttaggaattgttttgttgttatgggaaaaacgttagctataagccttatgtttttatgccttaatttgagtatatcaaatttagatgctctattgttatgggaaaaacgttagctataagcctcatcaaaaaatggtgtgttttataaaatgtatgccatttttttttctttggaaacatgcgttttgtactccggctcttttatcatcgacgtttgtcatcgtcacgtcatcgatacatgcggagtttatttagcgggttacttttgttttttgttttttgcaagaaaaccctattataaaacatgctgcaataaattttaatttcttatcttattttattatgattttcgaaatcaaaagaagatatacttaagtttttactctaaagcttccatctcttccttgaacttaaccattgcaattcttggcaatgtaaccactatttgaacccctccgaccatatccgattccagcctagatggtcgcatgaacatattaaccgtcctagctgtctccgatggaaccacgggtacgatattcaccggctcatcccacccgaaatccatcgatccgaaaatcccaatattcctccaatcagtcaaacaaaacaacccatctttttttcctttgatcgttaagttcatcttaatgattttttcagtgtttgcaagctcttcttggagataatctttatcgtgagcattcctcttcgcttcttttatgagctttacgatatctgagatcgtaaactcttccacttctcttgcggttaatggcacatacatatcaatatatgcattgccatagtatccatcaggcaaaggtggatccacaacgttgcggattcctactgataaacccaaaacagtgactccatctcgatccaaattaagagctttaactcttgacttccacaaataagctcctataacttcgaaagttgtgattgtctcattagagaagtcgtactctttcaatgtagcttctttcaatcttcttatgctatcggctctaatagttattttttcagttacctatttaaatttataagaatggaatagagtttaaataatattttagattagaaatatatattgtgggaaataaaggacatgaggatcttgttatgtgcacacatacccaatcatccgttggtaagtaaggcgaagcagctgtgtcgtcgccgggaacaaatggaggttgatcatcttccggcttccccacgagtctttctctttcccaaatcggtgtcaccatcggcttcttcttcccgccagccaaatccgtcaaggcacacatgatatgaccttctccatatccatcgcacattgcatgtgacattgccatccctaagataaatcctccacattcaaatttggttacctgtcattatcaaaaaggtcattttgcatggagggaaatattaatatatctaaaattgttgtaagaaaagtttggtcacctgccacaagatgtgcatcaattacatgcataaaatgtatagaaaattttaccctacaatagactcaaatcaggccgcaatgtaacgcaaaattatttagaaaattagacaagaccaaattaaactaaattatactgaatttgtagattccaaggcggtcatgcatggccattttgattaacaaaaaaaacgaatcagaattcgaacaagacgaattgttttttttaatatcctaattatctttgaaattaaggaaaaatgtgattaaaaaacaaatcccgacgacaaaaaaaaataaaaataagacgacaaaaaaaaaacaaaaaaacaaatcccaatcgaaaccaaaatcgtaccaaatcatatagcttagattttatattggaactctaattcataaacaaaaaatatgcatgaaccaaaatcaaaactctggattgaacacacctaaaaaaaatgaccaatggtttgtgtacctgcaaagcaaaaggtcgataaccatcaatatccacgtgaagtacaggcaaaaaattcaaggccgtatccgagtcaatattctctagattcttcaaagaagagagctcgacatttgcagtagctaccgtgaacggcacaccacctccatcaccgccacaactcaactgaagcttccggtcactttcctgccgcttcaaactccccgaaagcggatagtaatacccaagaagatcggataaagcctccctaagcaaagcttcaggccggttatcatcatcagcaacgttcttggctttgaaaacgtaacatgccttgtaaataacttcgttgtaaggatcattgtcaagtgttgaaaggttaagagtttgttgaggaatatgttttgagggttttaccatttcggtgagcatcttctcgaccattaaagggatcgatgaacctatgtgaatcggcatgttttaatttttatgtgtttgacaaatataagtgtataagtactctaagaacactcttgtcttttatagataaagttttggcttcatgttggccacgtttaaccttaaacattgtaagaagtaacaaatggcactcttatttatattctaagtaagcctttattgtccgcactgccaataaattaagaaaatggaaacggtttgacattgtagtttcattaaatgtcattttgaaaccaaacaaagctaagttatccttgttgtccgcacggccaatgaattttcatcattatttgaaaaggtaaaagcaaacgtacgtaacttttctcatgttaaaacatttggttttacaacaagtgatactatgtggtagccacggagggagagagtgaaaggaaattaaaggaaagtcttaaacaaattcaatttttacgaatatgtatgatttcaggagggtttagtgtaagagcaaatgctaaactatgttcccttgtccgaaagtggaatctttggccaaaacatgttctgttttccagtttacaagaattctcctcctatctcatattcctaaaaactgaaacagagccaaaacgaaaaaactatatatagcaaatcttaattcacagttttactttttaccctccttccatttccagaagcctctaggatgttagtggctcaagccttttgagtcctgtttcaaaaagttttcaaagaatcaatcacgtctctgaatcttctgcttcttcttctattacagtcggtagtgatccttctctgctgaaaccggggtttaggaacttggctacaaaagcccatagcttataaacatcctcaaagttcgacaaaaagcttagagaagctgtgacaacctcaaatcgcacgaacccatttttaccaccacgtttaccagcttctctctgcagatgcaaagaactatcttccttgatcctagcgcctccacggtggtttctcggaagatccattatgcgtatgtgactcaatattccaataccaagagatacaccttctctctcagccagtttcagaacaatttctggacttacaaatcctttgcttttgtctttcacgttgaaagcaactgccgctcctctttcgtactttatctttgggccataaatctgcacaagattcatgtatctgctactaccgtcactgcctggttcaggcactttaagctgtagcaaagagatcactagccagttaatcagaaatctgagcctacttgtggttttattaagacctaacatattcacatgatcgatatggctgcaaacaatctcgggctcccttctgtcccaatcatcctcattcgggttttcaccatcactttcgtcatatacactggccagagaagcttcaccttggtccagactatgactgacacggtccatgttaaatgaaacccttgttcctctgcttggttgttcatcttccaaacccaaaagcctcccaccagtaccccttcttcccaataacctaaactcaccttctgtttctcgtctaattgcgttatctttcatatctgaagaaatcttggagcttgagccatttgatccaaaaccagatcctgcacgatacacaatattaccgcagttttcttcctgtatctcttgaatttggagattattagagttcctcagattccgtgatggcgtagagtttatctcctgagtaactgacattactgcagcatcaaacgagaggacatctttaccatcatacataggactgctgtaactctttgccaccggttttggtgattgccttttgctggtaaaccaaaacggtggcaatggagaggcgattttatggtggttcaagtgacccgcactgtcagacccgagcggactttgacccaaatcgatccaaaacgaattatcggatgactcatcttcactgaaagctggacttttcatcaattctccaaccgaaacactttcattttcttcaaatatggtactactagtcccatctctatcagaggcattatcttctaagagatctgtctcaaacacatccctcacttgagctgaagtgtatgcaccagagaataccggcatctgagcgcctctacgagcagcatctgtcgtagccggtttatcaccatttgtaccaatgtcatgatcttcaagaccaaccaatccgtcaagaccatctatcgaatcactgagatataacggatactgaggtgtgatcttcacaattcctgatcctgttttcccggactgactctgaagattacccatcaccgacttcttaatcaacaggcaaccaaaacctgtaggatcatgcccaaagaccttgtagaacgaggtgatgataaactctggtcgaaacaatgataacccgagcgaatccatatctttgggacctaaagaaccagcatcaagcaacacatgccagttgttctgctgagcaagagccatccactggtaagagtacttagaacctgtaactctagactgagcaggaaacacaaacaacccaaccgcagaatccttcttcttcctcttcttatgagacaaacgcttcttcaaatccgtcgaacacagcttcaaagttggccatttaaaccaagcgttataagctttagcacctttctctcttgcagtctgagccatccaattcacagactgactctcatgatcaaacattgtcaaaagccgcttattcgtatgaaaaggataagattccgcaagcaacctaaacgcagagcctctacttccagtaaaaacaagaccatactcactctcaggtatattcagataatccattatcctagtcttgagatcatgttccacagttccaatctcagctccaccataaagcgcatggttactcaaattagcagtaatctcagataaactaaacgtacaagaatcccaataatgcaaagtctgaacataagaaaacaacccaaatccacagtaatcaagacatacctttgaatccaacaagtgaccatactcatcagatctcaattgatcaactttctcagaagtctcaaactttggatacattgtaagaaacttattaaaagcttcaagaagctcaggtatatcatcttcagactcaaaagcacgttctgcagctaaagcagtagcacgtaagaactcacgttgagcgtgtaacctagccaaagatctagaacgacctaagctctcatcttgattctcattctcaacgtcttgagatttaaagagtgacccattctcagaagcttcttcaagagcatctctaagcttatcttcatacaatttcctaagcattgaagctttccttctaacatcgattggtgaatcagaaccatctcttctcctactcttactcttatctaagatcagagtagcacagtgatgaatttgcttccacaaaggaaaatgcattaatctcaaatttcgaaactttcctaagagattaatcagaagaagggtttctctagcccataagagaactaaaaccctaaaaagtgaagatcttaaagcagatcaaagagaagcctctaaaagcggaaactttcacaaaacccacaaaaaaagtaaacgactttcacggaagagaagaagtagcagaattttcaacaaacagatcccaaaattgtgaaaggaagaagatgaattttgtgaagctttaagcttttggttttgctctgtattgaagcttttttagagaagatgatataataaatgcaaagctgactcctttcaccaccaatctctcgtttcatttactacaactacaacactctctctctactcagtgcggtttctctctctaatcctcgggtcaaaaaaggcattgacttttttttccattagaagcagagtagtggtggcgttagggtttttgagaagcttaattaatcactttctataatcatttgattttgtattattcaaatgaaagatgattagtaacctcattttataattaatttgtgtttattttaagcagagagaaacaaaacagaaacgatattttttacttaataaaacagaattttgtcttatttttgccctgaaaaaaatgtaagaattagtcaactcggcaagtaaagaaggtaattaatttgggggaaaattttactgtcaacctttaggattcttaaggattatatttagagagtgtgaataactgaaaatacattttttaaagtcaatttaagaaagtgaaaagcttttaatttagatatatgttgggagtgttgggtaaggagaccaaatgtattaaatatgttaggttgagaacagtgggaagattcttgctcttttttagactccacatttatgtaagaaaaaaatatatcagaatattttttattcaaacatagcttatagaattctatgatgtgtaattattagtagcttttttttttttttttcacagaaaattaaaatttcattgatggattagaacctgacaagacttgaattacataagttggcaaggaaaacaatccttccaagtagcttttaattcagaacaaattggcaaattacaaatgactctattatgatctatatatacatttttggaggcgatttttgaagataatattgaagatttgagccataattcaacaattaatttaaatgggtggtttttacccggtttaactctgttcggatcctggataacatgtttaattctgttctgatcttggataacattaatttttggaaaagttacctaaaaactaataattaaaaacgaaaattattgatttaattaccaaatttaatataaacaatatttctaaactaaccatatttcttatttaccttaactaatttcctaaaatatttctatctaatttaaacataaatatataattcttctttcatttttatttgatcttatactttatttattttgaatttatataaaatatttatagttaataaaatattatatttttttctgaatatgatgtaattcaaattttttaaaacggacatatattattcaacgtatgaagaaataatatgtgtacaatatcccacatcgcttagaaaaattggacaatggttcagacccatattataaaaggaccaaaatgattctgattacgaatgagcaggaagcttgatttatcaggcgtccaaaattaaaatagttatccgattttactcggattttttattttaaagaattgaaactttaaaatgtttcaagaaattataaatattataactttatcaaaagttaaatattataattttaaaaactttgtataaagtttatctttaaaaaatactttaaatatttatatttttaaaacttataaagttttaaaaattataaattgaattttacaagaaatttaaacattataaatatataaaaaatatattaatacgagacgatatattacaggaaaaatcttaaatataacaatcaaaattcaatgatgaattttgggtcgatattgtatttttttaagtttcaaattttataatattgaaatttataagaaaatgacaaaattatgtttaatttcacgggactgggttatatggtaggacgggtttgggtggataataattacgattttaaaatgttccacatcgcttaaaaaaattggacaatggtcaagagccatactataaaaaggaccaaaatgatttcgattacgaatgagcatgaaacttgatttatgaggtgtccaaaattaaaatggtttgtttactagggttatttatgttaaaaaattgaaactttaaaaagtataaaaaattataaattaaattttacaagaaatttaaacaatataaaagatattaatacgggacgatatactgcgagagaaatcttagatataacactcaaaattcaatgatgaaatttgagtcaatattaatcttttttgaagtttctaattttataaatatttgaaatttataataaaatgacaaatttgtgtttaatttcacgggacggggttatatggtgtgacgagtttgagtggataataacatgggatagtatgctatggaaaaaaacatataataacaatcataatataattatataatcttaaacactaaacaaaattaacaatattaaaaaaaacacttaaaactttaatttttttaaaacacattttgattctttataagaaatttaaacattataaatatatttaaatttatactacgggtgaaattttagaattgactgtttgggttgataagaatttgcgatagaagtaggagttaaatcctagaatgacaatcaaaatataattgtacaattaaatactaccgcgagtgaaatcctagaattgacgagtttgaatcgatattaatatgggatggtgtactacggatgatattttagaattgactggtttgggttgataataatttacgatagaattaggagtgaaattctagaatgacaattaaaatataattatacaattaaataccatcacggatgaaatcctagaattgacgggtttgattcgatactaatatgggatggtgtactacgggtgatattttagaattgactggtttgggttgataataatttgcgatagaattaggagtgaaatcctagaatgacaattaaaatataattatacaattaaatactaccacgggtgaaatcctataattgacgggtttgattcgatattaatataggatggtgtactacgggtgaaatccgagaaacaacaatcaaaatacaattatacaatattaaacatttaacaaaataaacaaatacaactgaaaactttaaaatttgagttataaaattttttttcgcggtgaattatacatttaaatcaaacaatagcataaatttattaaatcatcctaaaaaatattcaattattttttatttaataaaaatataggcccgcggtatatcgcgggttaatatctagtttatgagattttcatagtatacttgaaagtatttatttgaatattaaagtttggagatttttgtttcagatacttttaagaaataagaatcttttttcctaaccaccttatatgaaaacagagagggtcatgtcgaaatagagagtttaacaaaagtgaatagatgttggctttttcttctgagacttcttctaattaggtccttcttcgctgccttagtcttccaccaatgctatctggatttggttctagagccgctttcctcttacttctcgttactcgagctttgaccacaagggtctgactttccccaagtcttgtctccaaattcgagtcttgtcctgtcccttgttgaatttctggaagatcatcaccgatgtgggcacatgaatgttcttgtttatcttgctttggtgtctcaagatacatgacctgcgcatccaccaatgaagtttgatcatcatctataggaatcaagtagctaactggttttgtctcagaagtcgggtcttgtcctatccattcttgaatttttggaagaccatcaccaatgtgggcacatgaatgttcttgcttcggcgtctcaagataactcaagacctgaacatcaaccaatggaatctgctcatccacatgaagcaagtagctatctggtttcgtctccaaatttgagtgttgtcctatcctttcctgaatatctggaagatcatcaccattgtgtgcacatgaatgttcttgctttggtggcacaagacaacttaagacctgaacatccaccaatgaagtttgatcatcctctacagaaggcaataagaagctcagtgaccttctagctgaatttggtgtctcatcctcctctttcttcaaggaaccaccactctgacattccatattctgaaccttttgtacttcttcagggagatcaccattctgatcttcgttcgtgttttcaccttcttctttctgtaaggaatcatcattctcaagcattggtacgtcttcatcaccagcaatcttttcttgaaaggaaagtgatctctttgcagacgcttgacttggtgttgtgtcatcagttggcgcccgtttggtttgaatcagataatgtgccacagacttatacccaagtgcagctatctggaaacaatccaaagaaagaaagaaatcttcagctctagattctattcaagaatcaaaaacaccacaagataatacaaaagaacaactgaaaaaaacgcacccttctgtaaatcgggccagttggaacccatcctttattattccggcacaaactgcaattgcagatcccgcgacaagcgggacaaatccagtctggattctcaagagcttcaagcacatgttcaccatatctgttcatcaaaaatattaatatacattcatcatcaataacagaaaaactaatagcaaccaacctcatgaacaaacaatcaccacagaactgtccttgaaccaaattgcattcactgcactgtgtacgatgccccatcgtcttctgcctgtaagaaacacacaaacacacactaaagcattacagaaaaatcatttcagagagttgcaatatcaagttctcaacacatatgagtttggttattacctgcattggtgacaagtcttaccgttaaacggatcataaatccgtttcccattcttatcatagccatcaacaaaacaagtccagcttctttctgtattcccaagaagcttctcatgttcctctgtgtaaatctcagctcttatcccttcaccaatcacaacactctctcgtttagatgctttcttgcccttctcattgatcccatcagtgtagataactggagttgtgttctccaatctaacaatcacagaagaaaagaatcaataataaacccaaattcttactttaaaatccaaattcttaaaccctagttttgcctcaaaaacccaattcctccagaaaaatctctcctttaaactgatacaaatcgaatcataatccctaattccacaaactcatctttcaaatccaaaaccccaaaatatgatggaatgagagaaacggagacagagaaaggaagagattaccgagaagatcggcgagaaggctgaagaggaggagtcggattctgaacagaattacggttaccgtaagatcttttaacgggtcgggtcttgggtttgagtttgcgagagagatttaagagacccagattgttcatcctctgaagattctctttgatcctctcttccctgcattgttcgtaaagagagacctttggggtttctttgattagttccggattagggtttgatttaggtactgaatcttgtgcttcagttctcatggtgagcatgatgatgatgaagatgatactgggtttcagatttcagaactctctgtcactctctttatggctgctctctggagaaatgatagtaaaagtttaggtttttatattgttttgagttgatgtcctgatgttacagcaacggtcggatttattatttgaaaagtgtgcttatggaaatggggaatagtgtttggaaatgtttactagcttctgtatcataaatccctaatgatgggacttaatctttttaaatatttttgtttccttctaattgcaatacagctaagtagagatagtgggaatatggaaagttgtaatcttttaagagaaaattaataaaccattctacaaaaattgttcttggtgcactttattaagattacgaatattaacatttaaacaaatttccaatagaaatataaagtttgacttttgagtaaagtttagggactgtccataagattgagagtctcaccttgtcaaccaaattaacaccaaatcccttcacatttaggaggatgtattcaatatagcatttggaatgatttgtattaagatgaaaaatatattttattcaaacatgaattctaaaaagctttctaaaatcaagtgttattggattaataattttaaaatctagaatcaaatctgctgttattagaaatattttaaatagtggatttgaattgacttgagagattttgggtgaaatttcaatgaatttttaaaaattcaaacattccctgtctcatagtttgaggtagattttaaacagttttaataacaaattttcgaattcactaaaataatttcaaaactcaataaaactcaaatcactccaaattctttctacaatacactcccttaatttttatttttttttcttttttcctatttttttacacccctttattaattactgtgctttactaaacttaccacacatacaaaaatatgaaatttaagttactaatatagaagaatactgttggggactagaatcacatgatcgttgttgtcataaaatctatcgctagttaaagtattaaaagatcgagaaaaaaaattattagttccccaaactcataattgtatgttaacattttctacccattttcttagatttgaataaggaaaaataatattttggttgtaaattgtaataactaaattttttccggatttgattatttgttttattttcttgacagtggtaactctgctcaagtgcttgccttcatctataaaattggagagacttttcattaattactgttccaacaaatttgaactacttttaattatgagtctaattaatacagagagagttcaagcgtccaacgaattaaaggtctcgttgttattttctcactagctaaaggaaaaacttggccacgttgatgaaccaccacttgaaaaatcttgaagcctccatttacatcaaaacagtcaaaccaaattcgcaatctcacaagtttcccttccatcccaaacaacactttattatctcttgttatatataaatctcaaacaataacactaacatttctcaaaatcaagaaatatggccacaagagcttctacatctagcagagtctctccagctttcactttcctcgtcatcttcttcctcttatctctcactgcttcagtagaagctgctggtcgtggagttaacaatgacaagaaaggcggcggattaggagcttctttcatattcggagattctctagtcgatgccggaaataataattatctatcgacgttgtctagggctaatatgaagcctaatggtattgatttcaaagcctccggaggaactcctaccggccggttcaccaatggacggaccatcggtgatatcgttggtacgtaacaaaaatgaaaaaaagttctataacccatatatagtaaaatgatatatgtggtatacattattagtctagagattatgttcaactaacacacctacacatgtatgttgacgtttattactctttttctttgttaaaatgattaattttttttagtgaatgattctaaaacgttaaatatttgatttacgtttttttcaggggaagaactcggatcagcgaactacgcgatcccgttcttggcaccagacgcgaagggaaaagctttattagccggagtgaactatgcatctggaggaggaggaatcatgaatgccaccgggagaatctttgtatgtaccaaactaattttaatcatatgtgcatttaaaaatttctaaaatttattctagagttatgaagttttaaggaattgtaaatatttggtaggtgaatagattaggtatggatgtacaagttgatttcttcaacactacacggaaacagtttgatgatctacttggaaaagagaaagcaaaagattacatagccaagaaatcgatattctcaatcactataggagcaaatgatttcctcaacaattatctattcccactactctcggtaggaacacggttcactcaaactcccgatgattttattggcgacatgcttgaacatctacgcgaccaactaaccgtaagcaacaaaatattgatctctatccatcaaaataaagttagagaatttttgtttagttcatttgttatcatatgcatgttatggttgaaatacagaggctgtatcaattggatgcgaggaagtttgtgatcgggaacgttggaccgattggatgcataccgtaccagaaaacaatcaatcaattagacgaaaacgagtgtgtggatttggctaataaactagcaaatcaatacaatgttcggttaaagagtttattagaggaactaaacaagaaacttcccggagcaatgtttgtccatgcaaacgtctacgatctcgtcatggagctcattactaactacgataaatacggtaatacatatatttttgtcttctacaactcacacacgcacactaccatatatacacgttttaggccatgaaatgtagattatgaatatatgaaaaataaagatttgtggatttgtaaacttggtagggttcaaaagtgcgacaaaggcttgttgcggtaatggaggacaatacgcgggtataattccgtgcggaccgacttcgagtttgtgtgaagagagggataaatatgtgttttgggatccttatcatccgagtgaagcagcaaatgtcatcatcgcgaagcaattgttatatggtgatgttaaagttatatctccagttaatctcagcaaacttagagatatgtgatttgattgtttgttgaactaaattaaatgtcccttggaggtatttatatacataatttgttatacgccaagttaagattactctttcactctttgtatatgtatgtgtgttggtcgtgtttgattttagtgagaatgcttttgttttgtcaagatgtgataaaattcgattacctcttttcccaaagttttcaaaatcggagtgaaccaggatttggatattgaaatcgagtcggttcagttaaaccgattttaatctagactcggcaaccttaaccggtcggcctgattcggttttcactgtctctctttagtctttcccctctttagggactttccgttaatgtcgccggcgacggaaactcaggaatgtcggttctctgtgatctcgattccgacgaaaaggcagcaaatttgcagccgtgtcagccgcagagagcatccccttcttctcgtaaccgcagcagccgcagaaactccgacaaaaacgccatcgtttcgatacagtaaatagtaggtggattttcaaaagcacctgctttagattcttattttttatgcttcagtgcttgaaactgttcgaagggtagaggaaatttgatgaaaagttttgtcttttcttgtggtggaagctgaagttcgttactaaggctgttgtctaaggtccagagaatggtaaaccaacgttaaagtgactgttagttagtttgtggctgttcattaagttccagataatggtacaccaactttacattgagtgttagttttaagtcggtagagttgatggagttagtttgttggtaggtcgccctctggattgtatataatcttagagcataatctttggatgaaaaactgtttatatgtacctgccatcttcaagagataatgatagatttcttgaggcttttgataacatggacatatgatctgcatctttgcattttcaagtgcaaagatgcagatcatatgtccatgttaatatcaaagcctcaagaactctatctgcccacgaacaagatcagaccactcctggttatttaccttctcttttttagcctctttgtcttctattttttcgactattagttttgctggtagctgtctgcgatttacaagagatggccagttagtagttgaggcttgcagaacattggcatatgatctgtgtctaccatctctatcgcctgataattattaatcattaattgctgatgttcttttgcaatggctttgtcctctctgatcagttgtatttttttacagacgtaggcgtattagtgaattacaataccaaattggccaatcttcactcagtgaatcagtcagttatatgaacttacttttttcctctcattagcctagattcgttttccgttttctcctctagtttttctttgcttcagtgcttgaagttgtttgatcgtagacgaaagttgatgagaagttatagcttttcttgaatctaagattagatcagtgcagttgccatattgttcagttgttttcatcttgcatatagaaattgctctgcaacattggttatagtgatgcttcgcaatgcagacattgcagttctctctattatgatgctatgatcctacatttgaaaccaagaggccttgtaactacttctctgtgtaatacagttttctcacgaaactttattatataagcattatcatttgcttagttctcatacatatagatgtattctcttatggcgtattatttattggtggaagctgaaattggttaatttttgcaatatttatttgcaatctccaggagaagagcacaaacttcttgaggcttggagaacattggcatatgatctgcacatttgatctccattacttcttttggtggaaagttgctaatcatccaacgctggtaatcttcgacttccacaagatcctctctgcatacaatatatatacgtgtaacggatccgtacccttcctcactaaagcttcttgtccctgccagattgtttgtaactaacgggttttccctcactaatgtcttcaccacttcaagatccttattcgccacaacaacaatcaacaaaagattgactgagattactagcacaatcccatttgtttttctttaaagattggagtcttacttgaactggagagttttgatacattttcttggccataaactttggtcccaaaagagtatactgtagaggaaaatcaggtttcccgtagttcacacacgtggtgtccaaccattcctcttgtggaatgcttctgagcagctgcagatttaagtatcagaatcactctgaagagatatcagtcagataacatcatgttcatttatgtaccttttcgtaaacataagcaggtgggtttattgtgtcgggcatgaaagctgtcaaaaagacaatagcggcaatcttacaagcgaagctgtcagcagcaagtgcagcggatattcctcccatgctatgagcaacaacaatcaccttaccgtcatctgagccaagcgagctcagaaactcaagcaatggtttgcagtaatcgttcagagtctgaatctcttccactttggtcatgtttatacctgatgcagcaagatccactgccgtcacacagtgacctgcaacctccagctgcgttttcaccttgtcccaagtccatgccccgtggcacaccccatggatgagcacaaaccgcttctggttcttattctccattgcctttcttactctcagcatcttggttcaacactaatatatatggtaagtttcccacagataatctttgcatattgactgttagtttttggtcgttctctgagttccattgactgttagatttctcatttcaaatatagtaagcaataaagtctgaacctttagaaagatccttttagaacacacttaattgtatcaaatcaagatacattttttgttggttgacttgaagactccacatgaggtagtttgttgccatgttggatttcgtagtaattgtttcagtgactgtcacaggtgagaagtggccatagtatttagtatctgcaggaaagtttttggaaagagagattgtaaaatttgtagtttttgaaagtgaatgctttattggagaagagatgtacaaatttatagggatacaatggagagtctaggaatatgtttattatagttctcttatgatctctatttactaaatcattcttctaaaatattgtttctcatatggctttttgttgtggtgaagttgaaattcattactaatttgcagtaacgatctcaggtttatttaggcgtatttatctgcaatctccaagagaagagcacagagttcttgaggcttagagaacattggcatatgatctgcatctttgatctccagtacttccttcaccgggaagtcattgatcatcccacgctggtaatccacaggtaccgcaacgtcctctccgcatacgatatatatacgtgtaacggatccgtacctgtcctcactgaagcttattgtccctgccaggttgtttgtcatgaacgggcttaccctcaccgacattttcgccaattcaaaatcctaaaccaacacaacaacaattaacaaaagtttaactgaggtttacaagcaatcccattttagtttttatgaggcttggagtcttacttggaggggagataggttatacaaatacttggccatgaactctggtccaaaaagagcaaactctagaggacgatcaggtttcccaaacacagtatccatccatacctcttgtgtaacgtctttgaccagctgctagtttcaggcagatatcagaatcacattgaagagatcacaccgtgaagttaataatcatcgtttttacgtaccttttggaaaacgtaagcaggcgggttgcttatgtcgggcataaaagctgccacaaagacaatagcagcaactttactagggaagatatcagcagcaagtgaagctgatattcctcccatgctatgagcaacaagaatcaccttatcgtcatccgagccaagtgagctcagaaactcgagcagcggtttgcagtaatccttcaaagtctgaatctcatccaggctagtcatgtttacaccagatgcagctagatcaactgcggtcacagaatgaccagcagcctccagctgggctttcaccttgtaccaacaccaagctccatggcagattccatgtacaagcacaaacttcttctggttattcttatccattcccttgtttactctcagtatttttgttcagcacttatatatagaaatagaaatactttctgcattttggctattagttttattaattcaaccatatgaatagaatgcaataaaattcgaacctttggaaagatcaatgtaactgtattattaaatctaaatacatacatttttgttgtgtatcaaatgtttttcttatgttaaagaatggtataatgccagttgtaggaaaagaacgtatcgaataagaaaacgactattaacacatttggactttagtgaaataaaagttcattaaagtgaaaataaaggtaatgattttgatgcatgattatagttttttttttttttgtcaattatatttttgtttaatagttagagttaagtaagcctagtgggagtggttatgtagtagtagttagagactttatttgtgtgtgagtgtgtgtaatgctgtaaagaatgtgtgagaaaaaaatgcattagcttttcttatgtcttccttttctcaaaaaaatttaaaacgtttttttttagtcaaagtctaagttagaatcaaaatagagagatgcaagaagagagcaacaaatattacgaatactagtaaaatcaacaaagatgcactaaaaacatagtgagaatattattttatcatttttgttatatgagattgattagcattattgtcgtcttaaaagctaaaacatgctaacatttttttctgtgtatacacggtgctcatgctatttgcttccttgggcaaacaaaagctagacgtctaaaaataggtataaaaccatcaatttgatttctgtataataagagaagttaaacactgccggggggaaatatattgaacttaaggttctatatgtttagaaaaaaatcaattgcaataggatacaagcacacgatacaacaatactattgttaggatatatttcacaaaagatgtttatttagatatctaaacaagcgtttagcagagaattactagaaaatatagtaaaaactatttttcggtgtccaaatgaaataaaccaaatctttatttacaaagtataaaaaatgatgaattttgatttagctactatataataactgatattaaataaatcttaagaatccaaataaatttttgtttggttcataagctgccacatgttcctagtactttatctaggtatcatgtaacttctatggctgcaggatttaccaatgggaagaatggtggttgttatatgcttacggccatatagatttttgtgatacaatatacttaattgtaacacgaattttatttatataaccactcttataactgcttctctatgtaataccgttcttatgaatattatttctcatatggcttattgttgaggtggaagctgaagttcattactaatttgtagtgaccatctaaggtttatttaggcgtatttatctgcaatctccaagagaagagcacatagttccttaggcttggagaacattgccatatgatctgcatctttgatctccattacttctttcaccgggaagttgcggatcatccaacgctggtagtcctcaggtaatatattatcctctccacttatgatataaatacgtgtaaccgatccatatccttccccagtaaagcttcttgcccctgccagattattcgtaaccaacgggtttacccttaccaacattttcgccagttcaagatcctaattaaaggtaacaatcaaaagaagaatacatgaggttactagcaatctcgtttgtcaaaaagaggtttgattaggcttggagtcttacttctattggagaccgttgatacactttcttggccatgaactttggtcccaaaagagctgactcaagaggacaatctggattcccgtaccttccgaacgcggtgtccaaccattcttctcgtggaatacttctgatcagctgaagagtttagtcatctatcagaatatatcactcgaaagcgatcataccgtgcaacaaaagcatcatgttttttatatgtaccttttcgaaaacataagcaggtgggtttcttgtgtcaggcatgaaagctgccaagaagacaacagcagaaatcttacaagagaatatgtcagcagcaagcgcagcgggtattcctcccatgctatgagcaacaagaatcaccttatcgtcatcctagccaagcgagctcataaaattaagcaagggtttagagtagtccatcaatgtctgaatctcttccactatggtcatgtttatacccgatgcagccagatctactgcggtcacacagtgacctgcagcctccaactttgttttcaccttgtaccaactccacgccccgtggcaaaccgcatgtacaagcacaaaccgctttttctccattgccttcttttacttttagcattttgcatcaacacatatatattatatgtcgtacggtacttcatgcttagaaacagtaccatgcttctggtggtatgtcgcgtgcaaacttttacgtgatcaaagcgctaatttgggtttatatttcttttgaggtaaagacaaaaaaaatctacaagtacaaaatcgaattcttggaatgatatggatgtaatgaaactaaccaccgcgaaagtgacactaactttggacttttattacattagatgtgaggaaactaattgtaatcacatacacgttagattgtcaacgtatgatctacgttttatgggcctaattcgcaaagtatttttttttaccaaaaatagcaaagacagctaaaatgaaaatttatatatcttttactgcttcagaatatatatatatatatatatatattttttttttttactttccattcgtatgctcttgatttattggtttcatcttcaacgtgagagttttatccatttttcaaagaagtttaggagttacaattttttctctcacatttttgatttcttgctcttttctgaaaatagtgtttataagacagaatcatgaaataatttttaatgagtatgattatttacttataattctagttgaagctataaactttgtaactgtagtgaagatcttaagattatttaggcatatttacatgcaatctccacgagaagagcacatagtttgtgaggcttggagaacattgccatatgatctgcacatttgatctccattacttcttttggcggaaagttcttgatcatccaccactggtaatcctcgggtaccgccatgtcctctccacatacaatatatatacgtgtaacggtaccgtacccttcctcactaaagcttcttgtccctgccagattatttgtaatgatggggtttactctcaccaacattttcgccaattcaagatcctaacccgtcacaacaacaatcaataaaggattgattacaagcaatcccatttttgtttttattaggcgtggagtcttacttggaccggagagagttgatacaaattcttggccatgaactttggtccaaaaagagcaaactctagaggacattcatgtttcccatacgttccaaacacggtgtccaaccatccttcttgtggaacgcttctgattagctgcggattttagtaaaatattagaaccacttggaagaagtcatacctcaaaaccatattagaatgtatgatgatgtaccttttggtaaacataagcaggtaggtttcttgtgtcgggcataaaagctgtcaagaaaacaatagtagcaatcttactagggaatatgtcagaagcgagagcagcaggtattcctcccatactatgcgcaacaagaatcaccttatcgtcatccgagccaagtgagttcagtaactcaagcaaaggtttgcagtaatccttcaaagtctgaatctcttccaatctagtcatatttataccggatgcagctagatccaccgcggtcacacagtgacctacagcctccagatgcgttttcaccttgtaccaacaccaagcgccgtggcacagcccatggacgaggacaaaccgcttcttgttgttcttctccattgttttctttcttctatactctcaatatcttggttcagcacttatatatatatatatatcgatggtcactttcctcatactctttctatattgactgttagtttctggtcattctcgaaacaaacactacattgactgttagatttctcatttcaaccaaagtaagtaataaattctgaacctttagaaatatcaattttagaacacacacttgatgtatcattaagagacaatgaaccaggcctctttagaagagattgattgcagctccaaatacattttcatcaaaatattatttaagagaatttgtcggcgattgccaatagatggtcacttagtagttgaggtttgcaaaacaatggcaaatgatccgtcccttccatctctatcactaaattcggcggatagttatcgatcatccatcgttgatattcttccgagatggtgtggtcatctttgctcacaatgtaagctcgaggaacagatccataccctttttcagaaaagttcttcatcctcgataaatcattaagaaataatgaaccaggcctctttagaagcaatctaagctcaagatcctaaatcaagattaacatattcatgagtactatatatatgtcatcatcataatgatgattacttcctttttttttgttataatgatgattatatataaattacttcaataggagaaagttggaggatacggtgcttcgtgaactcagcgctgaagaccacatacggctcgagctcagagcccatccaatcttctggtgtcatggtgcttgcaaacttttacattaggaaaagaaaaacacattcatacttattttccaagctcaatacagttaaatatacaagtagataaccatacggtagtaatctccctagtgacaaccatgaatatgaaacatgtccgaaacactacaatttaatctctaagaacaaagttgaatcttaggatgatatggtggtaaaactctaattaccactaaagtgacactactttgactttactaatttagatgtaaccaaaactcgttgtatacaccaccacagacggactaatttagattatctaacacatgacctatgataatagcatatacaccacaaatattaaaggctacaaaataaaatctcgatttaatggaacgattggactgactaatcggacgtatagaccaaaaggaattgttatgttgatcaatttttgaacaaaatttggtcgcttaaaaacgaggtataccttttccaggacgaacgatggtgagtttttggtgtcgggcatgaaagaagttacgaagacagagacagagattttgtcgggaaacttatccatggctatggctaaagtcaaacctccatagctatgacccacgagcacaaccttctcatcattcggcaatgaagtcattagctgaatcaacggctcagaatattgttcgcatgtggaaatgtcagtgatcgaccttgtgtctataccacaagcagctaggtctaaggcggttacacgatggcccgaagcctcgagcagcggcttcaccttgtaccagcaccacgcgccgaggcacgaaccatgtactagcacgaaatgttgcttcatcatctcctcactcttcacacatccacatataagtaaagagattataaagcttatcccgttttcatacatttttcttactcttctgatttagattatcaaacacgtatccaaacaattaagccacgtggtcattgtccgactctacaatctctctccgtttcttctctcattcctttataacaaaaaagacagagcacaatgactagatttacggtagtaacacgtaaaatagtattatttacatttaagtttatctttattgaggaaattaggttcagtctttttcttatatatatcggtgtattatgtgatattaattatacgagagtctattataatatttttcaaacactttgtgtttcatactattatcaatttatcatattcccttttcttatttttttcctactcttcatcatccacacataacacataaatgtttacattgagtaaattaggtttagtctttttctttatatatatcgatgtattatgtgacattaatcttacgagagtctattataattcttcctaaacacttttgtattttttactcttatcaatctatcatattcctttctcttacttttttctactcttcatcaactacatatatcttcttatataataagagaaggttttttctaactttgcctaccaatacgacatttggcactctattttgatgacatgtgtacttatcattaattgtagtttgactaaaataatttattaataaatataacatttatttagaaaatagtcattaaactataaaaatactacatattaaactacaattttgaaatgattttttttctatcataattgcaactctcttaactaattacaaaatcaaatcttttaaattttgacatgatattatgttttagactgcacattaatagttcacaactacaaataattctccaattttataagatttttttccatttttagttcttttaaacaataattaattaaaataattttgtttcgatcttatatgattaattttttttaaaagctgttaaaatttgatatcttacatttgctcatattttaacagtttttctttttatatgttatttatgcatgtatatattaataaacatatcatatcttatttttacaaaataaatgtatgataaagtaaattaaaaaataatttgttgatataaactcatacataatagttccaaaacattttattttgtaagtgatttattcaaaacaatgataaaagaatagtaattatagtatatattttatgatgtatcacttatcaatatttaaatactacatatgcttttaaaaatatgatttaataaaaaataaatgagtagatgtaaagctcacctgattaaaaaagactcaaatgaccatagttttgataacggttaaaaacaacgagagaaagaaaattaggattaaacaccatgcagttaaacctcattaaggtcattagtggctcaatgagattgaatactcagtgtctcatgtaatgttttaaaaaaaaagaaattattagtttgttactcatgtaacgttcatgttataaacgttcttctataattattaacctttattagttataccctaacaatctacttttctaatataaatagcaaatatttacacagacacaacacacacatatttacaagtgcttttgtttcctttgacaattgaagttattcaattactgaaagaaaaatgaaagatggtttgctgtatcaccaacatttacggtatcaccaacgtttacggcaagagtcctaaccttatcaatttgtctctttcatttaacgtttggactcatattacctttcagtttttttttatctttttcttttagtttttgtgaatgatttcatattgtttaatgtttctaaaatggttatattgagtcttacttacatgtttttgttttgttctaaatgtaaatcgagaaatttttttttttttttttttttggaagtagacatcaaatgcactttaaaccataaatgaatatgaaagaggaagcaaaacaggcaagagtctcaaccttatcaatttgtctccttcatttaaagtttggattcataatagctttcagattttgtttttctttgtaagtttttgtaaatgattttacattgtttaaagtttctaaattagttatattgagtcttacttatatatttttgttagttttttttttgtaggcatcaaatgcactttaaaccatttaaatggatatgaaagaaaaagttagcatactatggatagtagagtcaattacaagagaaagaaagaatcaaagttttgatcattcataaaatacaaaaattcaggcaagtgttttagttagtctcaaaaaatgatggagcgataataacaggtatgaccacaataattatataactatttatttgtctttccaaattaaatattttgaattaatttttgctataaatagttaccaaattttgttgacttatatgctctctaaaacaaaacttaaattgttttctgatttttaatataatgaagctcaattcttagtttctgaagaaaacatgatcaacattagttcactcatacaaattacaaaaatctatgtctataatacacattagaaaattatattgaagcaaaaaaaaaatagattcttttataggagtgacatattgaaatgatttaagatttatcttctccaagtttatattttcttaaattgttttaaaaatttatttaaacaaaaaaaaataacagtgtaaggttcataatctaaaattaaaatttagaatttagcttttacaataatattttttaaactcataacaacaacaaagaaaaaacttaaaacaaaacaaaacaatatttgagatactgtgaaaggggattaggaaatgagagaatgaaaataaattgtgggagttaatttttaatttattgtgtgttgaaaaaaatggtgtggagaaatataattaatttatatatatttatgatttcagttttgtaaataaattgtgggagttaatttttaatttattgtgtgttgaataaaatggtgtggagaaatataattaatttatatatatttatgatttcagttttgtaaataaattgtgggagttaatttttaatttattgtgtgttgaataaagtagagtggatgaatataattgatacatatttttatgatttcagttttatattaaactgtgtgttaaatatgttatttattatttattaagaattaaaaaaaaaacttatattgccaagtggaccaataaggaaagagtgaaaccttacttttatatatacatgattcctaattttttggtttcatttttaaaggttacctaaagtatagctattattgttgccattacatcacatataaataataacaattgttatataatcttaaattaattatatatataaattatggtttcaatttatcaaaggttataacatttaacttagagacatatttttccatcatttgaagttaaaaataaataactctatatttgtgcgataacaattggtaaacatcaaaattgaaaatttaaattatttttgagccatatattaacaattttttaataaattatatatagaaattaacgtctttcaatacatttaacaaattttatatgacttattttttttgaactgacatctgagatctttagtcgagttggagggtttttcattgaaagttatcttaaatcataagctttaaatttttaaatgtgtaaaaggttcatctattgttttgaattgcaaaacaattggtaatacatgcatttgcattttcaccaaaaaaaaaactgaataatttatgtttattttttaatatatagtaaaacatactgttttcacaaaaaaatataaaaacaaattgaatgcaaacttttaatcaactaaaatgtctttgtaaaaaacatcataatttgtaaacataaaagttactattattaattattttgatcgatatattaacaattataaataagttttatatataatttaatataaatattattctatattcaaaactaaaaccgtatataaaatccacgcatcgcgtggacaacttctagtaacatataaataaagagattataaagtttatctccttttcatatttttttcctactcttcatcatctacacataacacataaataaagagattataaagtttatctccttttcgtactttttttcctactcttcatcacagatccacacataacacataagtaaagagattataaagcttattctttttcgtacttttttccctaatctgcacacatccacacatgacacataaataaagagattataagtctaagaccatgtacataggtgatatatttagagtatcaagagcaataaataattttttaatagattaaataatacatttagctctgatccagtatcattgcagtgattctttggatacccactatcaggtgatgtggaggctcataattcgtcgaaatttcctgaaagcaaaaaaaataaaaaaataaatcattctacttttcgatagtcttctactgttttagctaactaattatattttttgcgaatgagtaattttgcaggctcttcgtgattatgcgacataattttgcagtaattttgtaatgttatgttttatatatttatttttcgattttgcaaataattttttttttaataataccaatatcggtcttaccgctagaaacagatttattaccagtatcataaaaaatcgcagacaataaataaacattaaaattaatactaaaaattgataatgatactcatagagtatcaactatgtgcatgttctatagtccctttcggtacctattttctattcttcacacatccaccgatccacgcataacacataagtaaagagattataaagcttattgttgtatccgacttttatggtgatacaacttgtgttagatatcagaatcattcgtagtaaaatgagtttttttgtctcggtcatgagagctgtcaagaaaccaatagcagcaatcttacaaaggaatatgttagtagcgagaacagcggatattcctcccatgctatgagcaataagagtaccttatcgtttatccgagcaaagatgaagatgaaattatttcggtattatgtactagtcgtcgaaatagtacaagataagtgattctggaagctgagatgcataactgatgatgaggagctcgaatactttgatttaagagcgtgtgttaagtcaaaaaaaaaatattattgtctgaaaacaaaatgaatcttataagctatatggaagtttgcacgaagagaaaagaaaattggcaaaaagaaaactttttttcttatggaatgtgttaaatatgtcttatgtgtgattggagtgtaagtttatgtttgttatataagggggacgtgaccttatgagaatgtggatttgaggaggataaatatcccaaagagattcgacatgagagattgtgtgtgatagtgtgtgacatagtttcggtgtttggtgcttgtgtgattaagctgatttatgtgttggtgttgacgtaagtattggggcgttttggtgatcgttgggtttgttggtgtgaagttcgtgtgtggcggttgctccaagacatggagaagtgaagtctaggctcatggggaatttagctcaaggtgaggttatctttatgaaatctaggtttagtacaggtagagatttatcattaaggtttcatgttattgaacggagcagtgaatcaagaggtttgtttgatttacgcatttgcgaataggttgtatttgctttcttgttctagtaaaatctggatatggtcccgtggactagaaaaaaccaggcttcgtgaacaaatttcttgtctcgtttactttatactctttattattacatcatccgcacttacacaaaagagctcagaaacttaagcaaaggttagcagtaatctttaagagtctgaatctcttcaactctagtcatatttatacctgatgcagctagatccaccgcggtcacacagtgacctatagcctccaaatgcatcttcacattgtaccaacaccactccccgtggcacagcccatgtacgagcacaaaccgttccttgttatttttctccattgttttctttcttctttgctttcaacatcttagttcaacgtaaagttatatatctcgaggattactttcccccacactctttgtatattgactgtttctagtccttctaaacaaacactagattgacttaggtttctcatttcaaccatagtaagaactaagaaataagtttgaacctttatgaagatccattttagaacacgtttgattgtatccactccaaatacattttcatcaaaatattatttaacagaaattgtcagcgattgccaatagatggtcacttagtagttgaggtttgcaaaacattggcatatgatcagtctcttccatctcaatcactaaattcgccggataattatggatcatccatcgttgatggtcttccgagataatgttgtcctctttgcacacaatgtaagctcgaggaacagatccataccctttctcagaaaagttctccatcttcgataattcattaataaacaatgaactaggcctctttagaagcaatccaagctcaagatcctaaataaagataatcatcgatttatcatgaaaatgattagtctttttttgttttgttaaaaatgatgataaatttaaattacctccacaggagaaagttggtagagacggtgcttcatgaagtcggtgctgaagaacacagacaagccggaattatctgaaccatatgtctcgagctcagagcccatccatccttctggtgtcatgctgcttgcaaactttttcatagtaattacgaaaaaatcatatttattttcacgtttattacaattaactacctttaaaaattctaacgaagtaacaaccatgaaaatgaaacatgttaaaacaaattactaactcatcaccacgaaagtgacactacttggacattagattgtctaacacatgatctatggttaattggttatagtatataagccacaagttataaaagactgcgaaatggaaatctcgattttgtccgactagactgaacaatcggacatatagaccaaaaggaaccgttatgttgatcaatttttgtaatcattttggctacaatcttgtaacggttttggctaaaaatggacgaccacgttgttttgaccgtcaagacttccaggtggtggatttaagaacagaacacaaaatttggctgctttaaaaagagatatataccttttcctcgacgaacgatggtgagtgtttggtgtcgggcatgaatgcagtcacgaagacagagacagagattttatcgggaaacttatccatggctaaggctaaactcaaacctccaaagctatgaccaacgagtacaaccttctcatcattcggcaatgaagtcattagctgcatcaatggctcagaatattgttcacatgtagaaatgtcagtgattgacctggttgtgtctataccggaagcagctaggtctaaggcggttacacgatggcccaaagcctcgagaagaggcttaaccttgtaccagcaccatgcgccgtggcacgcaccatgtactagcacgaagtgttgcttcctcttctcctcactcatattttcctttcgtactttttccctactcttcacacatccactcataagtagaaaaattataaagcttatcgttgaattttccaaaattgtcgctttcctttgagattcttttatgattttacgtgataattaaaatttcgaattttttcttgcataaagaaataactttggaatttttctttttaaaagcgacattttggctctgcggataagaaactttacacttattaaaatgcaaaataaaagtatctttctaattaaagctgatgttacagtgatatacaacttgacaagttgtgttagatgtttgttccgtgtcatgtaccaggtcaaatcacactagttggacaataatattaatttttgatataatattaaaacaattactcgtaactaaaaatagagataacattttttaaaaattacttatgacttaaaaaaattcgcagttgtaccgtacatctccattcggcgcctatatttgtatttactcgattgcttataaattcattattttgatagagattatcatgaaatatggtgtataaatctgtatcctataagtttaaatcaatggagaaaccataaaacataattttcaggtaataatatagttatctagctcacgaatcattattcataaaaccattcttgtgaatattatcatttgcttagttctcatacattatgtattctcatatggcttattattgtggtggacactgaatttgtaattgatatgcagtgatgatgatatttcagatttatttaggcatatttatttgcaatctccaagagaagagcacatagttgttgaggcttggagaacattggcatatgatctgcgtctttgatctccattacttcttttgggggaaagttgctgatcatcgatcgctggtaatcttcgggtgacacaagatcctttccgcatacaataaatatacgtgtaacggatccgtatccttcctcactgaagcttcttctctctgccatatctttcttaatcaatgggtttgccctcaccaacattttcgccaattcaagatcctagttcaccgtaacaaaaatcaacaaaagattgacatagattactagtacaatcttatttgtgcttgaaaaaaagaggttcttatgaagctaagagtcttacttggactggagacaactgatacaagttcttggccatgaattctggtccaaaaatccaaaactcgctaggaaaatcaggtttctcgctcgtaaacacggtgtctaaccattcctctcgtgaagtttcttttcttagctgttagatttcagtcaaatatccgaattacttggtgttagattcaaaaatattatgtaagctataagttttcatgtaaagtcaataacagttagaactatgacttgttggataagattaggtagttttattttcattttctgaaagtttttaacagttatgtaagtaagagcaactccagcgtatagaatttttgtagtttctaaaaaacaaaaagtattaatattttacttttacatctaaaaaaccaaaaaaccaaggtatacgagtaatagaaacgatcctaatattatgaattttagagattctctctcattaacttttcaattcttttttttgttaattgtatgagtttctactaagaaactactgctggagttggtctaaggtaaccactaaaaggggatgttgtcttgcggaagtgtattcaatcaagcatttgaaatattattttttaaaatccgttattattgaaaacacttcaagtattggattcttaattattctaaagggattttagtagctttttttgtttaaacttgcataccaatctcttaaaaaaaaaaagacaaatctaaatcccttgctttaaaatgggatttgaaaagatttcataataaaccattaaaaatcctaaatttacctaaaatcatcaaaatgaacccctcattatgttgggaataagaagccatagcttctaaaaattggtatcctagcgttagtgattcaagtgccatctgaaaaacaaagatgacccaactaatttgcttaaatctagcaaattcatttgaccaacttacaattaatcttggagcatatataatacaaataataaagagtccaaagatggaaatctttaatgtatcatatgcttgagactatttttttttttcatctatatgctcataagaaatgaagtagtaatcaaaagtatattctaaacataactaagaattatctaaattatattctacaactcttttcatatttatagtcatggactagtgttgttcactgttcagatatacaatataccttatatgttcatatatgtatatatatatggtatagacattgatttaagataagatcaaaataccttatcccatacgaaggatggtgagtgtttggtgtctggcatcatagcagtcacaaagacagaaacagagattttggtcggaaacatatccatggccatagctaaactcaaacctcctaagctatgaccaacaagcacaaccttctcatcatctggtagtgaggtcattagctgcatcaatggctctgagtattgttcgcatgtggatatatctgtgattgacctggtcatgtctataccggaggcagctagatctacggcggttacgcggtggccagaagcctcgagctgcggcttaaccttgtaccagcaccaggcgccatggcaagcaccatgtactagaacgacgtgttgcttcctctcctcctcactcattttcttctctacttttaactttgtctctcgacttcttactcttcaccgacacacgacacaacacatagataaagggattttaaaattacttttccttagaaatggtccctttcctctacatttttgtgatatcaagaattataataatctggattttgttttctagaaacaacacatgaaaaggaaaataaaaaggttataggacacctgttaatctgtaatagaaatgtaggaatttttttggttgtgtcatttgaaatttattaattaaactggttgtggaaccaaagataaatacaaatgtccacgaaaatgaagtaaaagctggcaaacaaaagaaaaatcccagacaccaactgaagaattgaaagccctgttaaaagaaaactttaaacatcagaaaattcaaaccaagattgaaagaggacgacgccataaatgtagggaatctttcttaagttataatattaagatttattaatttactcatggctcacgagttgaagccatgttcacaatgacacaacataatagaagtcttatctcatataaagaagtagaatttcatttttgatgaagtatatatttgatgccaacaattaaaatgttgctttccttttttatttggtaaagtttgtgtcttctccaattgaatgatcggtgtttttatcgtatttgacagattttcaaaatgatacaaaagatttctttactttttctttatttttaattttacgcaatacaaacgtaaaatcggagtatttatcatgaacagatggtcatgtaaacaacattcttcataaataactcttctaaaccgtaattaaagtcggttgacaacaaaagaatagaatcatccctaaaaaaataaaagattattaaaccttaaattactttttcttgtgtgcacaaaaaagaagaagaaaaatactactctttggtagtgaattatatgtgaaaagtaacaaagcctgaaatttaaaaatattcatcattattaattcatttgcaacaaacctttattatatcaaatccaatacagtttcatgaagatttgattaaacgaatttgtccgcgattttcaggaagtaatcactgagttgctgaggcttgcagaacattggcatatgatctgtctcctccatctccatcactaaattcaccggaaaattatcaatcatccatctctggcgttcttctggaattgctttgtcctctttacacactatgaaaactcgaggaacagacccatatccttcatccgagaagtttttcatcttcgataaatcgttaataaataacgatcctggcctcattaaaagtaatcccagttcaagatcctaaatcaagataaaaacatatatgtcactaaaaccaaaaaaaaaacctaagaaatagttttcttagatccatcggtaggactagtttggccataatcctggaaacaaatatggtttacatgtgcttaatttgccattgacccgctatcctctacattaattctacatttattgtagacttttactacttttaaattgtttaaactatatagtttaattttattttattttaaattattaggaacaattaacgatgacataatctcatatagatgatatattgaattgaagacaatatatgattggtttcttctggtgcaataattttgtagaccacgaaaaatttaaaacgatatatttaaatacgcttatttaaatatgtctattgtaaatgtgcacattttgtattttacaaatttatccattgagtccccgatttcatcaagtaattcgatgatcccaaaagcacttccggttttgttttagagacaataaaaaaagggaattgaaaacatatatgtagacaagtaataagatgatgaattaaattacctcaactggagaaagctggtagagacccaacttcatgaagtcagggctaaaaaacatactcagtccggaattgtctgaaccataaggttcgaattcggtgcccatccatgcttcttgaggcatgttgcttccaaacttttacataatttacaaaatttcaaacagagatttattttccaagtttattacaattaaatatacaagaaaatcaagaaccgtacggtggtaaaacacctaacaaccatgaaaatgatacatgttcaaaaaactagtagatttaattttgaaccccacgtgtacattatattgtcaaatgtcaatacatgatctatagttatctcatatatgccacaaaaagaactcatatatatagtagattccaaaaactccagaaacgaaatcttacatgcgctaattcattaatatcaggaatgaaagtattacatgcatactaattctagtcagcatgaggcctagacctatttaatactaaagaagactttgtggatacattcatatttatgatggtctatgctcatatcatcaagagtaaaataccaaaagaaaaaaggagataccttgtccaagacgaaggatggtgagtgttcggtgtccggcatgaaagcagtcaagaatacagcgacagagattttttcgggaaacttttccatggctatggctaagttcaagccaccaaagctgtgaccaacgagcacaaccttttcatcatttggcaatgaggtcaggagcttcgtcaatggctccgagtattgttcgcatgtggggatgtcagtgatcgacctcgttgtgtctattccggaggcagctaagtccacagcagttacgcggtggcccaccgcctctagcagcggcttaaccttgtaccagcaccacgcgccatggcacgaaccatgtactagtacaaaatgttgtttcctcttttcctcactcattcttctgaccttcgatattttcttactctcctaaaagtcacacgcagacaaatataagtagaaagattttataggtaaatgttctggaaaaaaataattgtcgcttctatatgaaggaatagtcgtctgtcgataatatttatttaactcaaacgtttatcatcgaccaatttaacaaatatacagtctgtcgccgatccaattgtattattttcttttaagcaaaatgtattcaaatgaattaccgtctggtcgatcatttaaatataaaggatttgtgcaaaaaacatttctcaattttatttttttcacttttagaaaatacgaattaatcacacaaaatcaataataatatgcattctaaccctttcatgctaatgtcaagttcgtaaacatttgacaaataatttatcaaatcgaatttctcacgataagaagttcaactcttcttttaatatcttatatatctgatgtatatgactagaaaaatatttataatatatagttgtgaggtttatactgtgtattatttttgactttataaaataaatctacatttttttagagatgtaaggtttagttacaaaaaaaattagttgaaagttttttttttgcataaaaccataaatataatcttatatttacgtgtgcatacattttggagtttgtgaactgttggttcaaatttccttggttttgttttggagaatacgtcggaagagtagttaaagctttagagagcaaacgagatcaaattcctaaatggttgggagatcacttcaggttggataggctaaggaaagcctttaggatgtgactcaaggattagggaccttcaaggttctatatatggaactctggatgagcatgtactcaatagcatgacaatgacctgcataaacttcatcaagttttttcgttttcacattttgaaaaatgattccactattagtatatatatatatctaacacaattcaaggtaagagataaagattttcgggggtcgaaataaacactgagagttttatatgattaaataaaatgagagaaatattattatttgtaaatcaaaactggtttcggtggtggaaatagatcgaaacctaaagcagagtaacatgactaaggtctttggtccgacaaggtcagcaatgagaaccgtctcacgcctaatctttggtttccccttgacttggtattatcagtttccgtgactaatacaattaagtaattaacaatatctatagcttaattatacttaataatttagataattatgacagcataagcaattgagtatatctttcatgtacaatgaacatacttgatacatatacaaaaaaatcgtgcaacagtttcattatcagcttttgttttttaaattgaagttgaactatacattatacatacgatcgctaaatgtagtatatcaccggcctaaaagttgacttgttagtatataaaatccaatcgagctgtaagtgctaagatatatttgaattgtcaatatcacccagctaattaatagatttagtaattaatcttcatccaactaaccactagacttagtttttaattgtcatctaataatgcagtattaactaatcaacatatataaattaggagacgaagatagaaaactaaagaggaaaaatactataaatcaataacgaattaagggaaacgtaatctacttttaaccaaatttcaaatattagtacaaagaatactgtaattttatacggggttttttttactcatatcatcttataagtattacatgattcctgtttttttttctacaccacagtatttttaatgtgttacatctaatttatcaaataaattttatattttcataatatgtttttcattttgaatgttgacatttattattttggggttctataaagaataaaagtttaacgcattttcaattatattatctcatagtcgatttaatatatgttagaagaaaaaaaataaaacaaaactgtttaatttgactgtataactaactacccacatagctcatttaaattaaacccaatttcattatataatttgcttacattctaccataccattatttttatcactcgtcatctcccttaacttctgaaatggtatgccacacactcatcttaagatcttttatatgattcactttttatgtaacactaaattatcggttgtacttttctggaaacctttcaagataaagttgtcttaaaatattttggatttgcatataagtggactaatcttttcctttcgctgtagtggtaagaaattgtatataatcagcagcaccccctagattcttcactcatgccatcaaaatttggtgctggtaatatgatttcatcgttcgttaggagaatggaaatggactcataaaggcaataaatattcctttaattaacaaaataaaataaatgtccgtttaaaaaagtccaaagaaatgtagattggggacctacgttctacatctctttagtaggtggatttgactccaccatacaaatacaacatgtggtttatatcaacattagtagggtatgatttaatggccagtctgtttcatggttctattcatttacttttgtggtttgttttgttttgatatgttttctttaatctctcattcattagtatcatcgttcttttcttttaaaatattatataaccgctgatttatcattttcaattgaaggatcaaattatatcaacatttttacgacaaactatcgtaaattttaaataaaaattccaacgcatcaaattatatgtttgtgttcaatttagaagatacttatcatccgggttttagtctagtattaacgtataacttgattgctaaaagcctaaaacgatccatagagttttgtgtctaaggtgtcaacgaaatattgacagttttgccatttaatataaataaaaatagcggagatttccaaaacgtcaagtaatttatatcccatggtgttgaaaaattagtgacttttatccaaaacgtgactttttttttctcgacaccaataaggacgtatacattgtataatggagcccaggtagtgctaattcttgttaagaaatatgtcatcaatcttgtctcggaaaaaatatagacaaaactagttattgtttcttgttgattaattggtttacaaatcgttatgctcgtgatttgaaacacatcactcaaaacttatagaagtgtctttttgttcaacgttaacgtcacaccctcgtgacttaattaatactgtaataacctataaatataataaccatatcacgataagggaatttattgataaaaatatatctaaatcaagcggggatgtttggccttgccgcaaaagagaacattaacaggaggctcggattcagtgtaaagagacttctcgttgttccatacacgaacatagagttcttgtcctaagtatctccttgaccatatttgtgacctcaaattccacattcccttattgtctaatgataccaatatgctcgtccacgacattggataaacctatttttacacacatatagagaacatttagaaccatagatgtagttatatatgcatgattactatattttaggtttcagatcggcccgcaaaatcaaatcaggtattatattgggtgggaacgttttgggctttaaattgaccaactagacaaatttttctttcttgtgaaataaaaaactaccagtgttgtttttaggatttacctgaaaagtgtgccttgaaacagcatcaaccaaattataacctctcctcttagccatgttccatgtgcccgacccgtatctgattatatgtcaaaacttcatcaattactctaacaaacaaatttgattgatcgagagcaatatggagggataatgggaaaagaattaggcttagttattacccaacaacatatgcactagtgccgtcaaggtgccaagattgtatagatccctcgttgttctggaacacgaattcgacgtactcatggagagccacatcaaagaccgaagttccgagaatggagggtcctggtgtgggaatgttcataatggttttgaaattgaacaccccgggaatgttgaaccagtcggctaatttcaatggagttgctgggttaacgtaggacacacggttcactgtgtaccgaagtttcccattgatcatggctcttccgttggctaaaacaaaagttcgatttatcggtatagtaccgtagtgaaaggatccttgtggatttggccttgctgcattcgccgtcaaatttagcctaaatatcacctttcaaatgaggtgttgcacgaaattgttcggtttaatattgtgcgatcagataggataaattacctgatggttcttgcttgtttcatggaccaatggatatggtaagtaggaccaatgggaaggggatgtgatggtctgattttggaaccttggtagctgaggattcctgtggtggttagtataggtttggtaaaccgagttgaagccacgatgaagtagtccttcactggagccttcaatgtgaccaacacggtcacagactggccaacgtgtatgtcaagcgattcatagacctcttgcagagtgtgagaaccttctacttcgacgagagtcatcatgtgtccttgtatcctaaagttaatcgatgtcgatatcccaacattcgatatccgaaacctatatatcttgcctttacaaacaccaaaaacatatcatcaattaagatatcaaatagctgagagtctgagagttgaattaaggaggaaagtggatcttggtgatgaggatataccatgttgaccggtaaagactaaacctttagaagcaccgttgatgagaagaccatccggaggaggaagagcacgacttgagtcgagcctcctttgcagttcctgtcaaaaacaataacaagaggctgaaatattcagatcgcttagttcaaccctaaaagtaatttggttacttgggaaataagttaactcgtgtattaaggattctttgtaccttatgtcccatcttgtaccaatcactgacgaggagagtgaagtcagcgtctggtttagggtaaggaacgaagatgactgacctctggttaacgttaagtgcaccaaaagcaccacttgctctatgcatcgacgttgaagcaaagtatgcataagtaccgatttggtccttaagttgaaaatggtaagtccaactcgattttggttggatcggacagtttgttcccaaaacaccgtcttgccacgacatcttcctctgtttaattccgttcctacgcattttcgaaagtgtcaagttctagttctctgattggtaaatggttttgtgattccatagtttttttttgtctaaatactaactaatttatatgtatattaaaataaaaatatgaaaaatatcggtagcttattcgaatgatctagtttttttgtgggataaaatttgaacgagtgatctagttgcatatgctaaaacattttacgtaccaggtgatgaggaaaggttcgtcaagcttgttaatgacattaacaacgatattattgtttgttacaccttcaattggaggaccagggaactggccattaataagaataacctgaaaaacaatataagatcaaaattttgattatattaattaatagtgattgaaacagaactaaataagattaaagagatggtaatgtagaagtggtataagagtgttggtttccgttatatatcgggtctagtctctctttggtacaaaatgttatttttaaaaatcgaaatacctaaagtctgcttttgaaaattggaaaaaacacccggaactgccacggtttataaagaaaaaaaatactaaaaattaagaaaatgcataggaaaaatagacagaacaatgtataacctgttgaggaacacctaaaggcgatctggttccataagtaacagtccaagtgaagaaaaggtaggggtcctctgcgtttatcacaaaaacagagctgaagcaataagctaataagaatcctagaagcagtagatgtttctgcttcattgttgagatcaacatagagtttaaaagtgtaattgagattgcaccaaggttaagctttaatacaagtgacgaagtgagtatggaatagagaagtaattacgggaagtgaggaagtaggttcatattgtaaatccccatgcatgcatatgtacagaaaggcaccaatgctcttttgcgccgtacttcatgcatttgccgcaaacagtattttctttttctttagatatacctaatagatttttatgagttgggaaaatatgatcgaaatctatgaattattatggtgttcatatcatattcacgtcactgatttttttttatatgtaaatcttgtttcagtaaatattattttaaaaaattatatgagttagaatttcattactcgacaagataattacctttcctggtagtactaattaagtgtatgaattattgtagatctattttcaaataaattgttgaaacgaaaaactctaatcgaataatttcagtgaactatatatcaattatcatgcagaagaaattaatttgtagaaatgatttaggagtgctaattctataaacacatcgattttgaaataaattattgaacctaaacactaatcgaatagtgtcaatatatttagggaatttggtcgacaaaaaaaaagaagggggaattgctttaagagtgttatattttaaattgtataaaatatagttttggaatggcgttggtcagtaaaagaaaagttatagtcaccgccactaaccgcttctcatttaatgcaccattgggtcatgaaatttgactttgattacaagttttcattttttttgttcatcagattacaagttttcataaatgtaaaaaagggaaaacaaaacaaaaaagcaactcgaagaatcatagatattcatcctaattcaaatatgaaaaaattatgtatcattgtaaaatgcgaaattgcccctaatttggacttgcttggcaaaacaaattgacatcaaaacaagttttttggctcaattataatttttgtttactcaaattcatgaatatataactgtcacaatacacaaatcagcattaattctaaagaactaaactgaaggtaacttgtggatatggcgaggcatccctaaaaggaatcacattgaggatccaaatttattgtttaattaatcacacatgaatgcgtcaccaatactctcgggtttttcatgttgctcttcttcagatcaattagttattaatgtattataagaaaacaatagaaacatgaactcgatccgatgaagcctcctagaaccgtcaaactctaattctcaccgtctccgatgctaatttagaggtttattccatttcaatcttatttattcaccttcgatccctttttctaggtcctatgacaaaatttcttttatttttggcaaacttttattgtatttaaaacatttttagtttatttaaaagatacattattttaatactaattagactactttggtaaaaaaaaatatttgaaaatgccaaatggtaaaattgtaaatcatttaaattaccgacaaaaaaaagtaaatcatttaaattaccgacaaaaaaaagtaaatcatttaaattattttatttgcaaccaaacatttaaactagataagtctttgactggttacctagtcaagaagataataaaatttacacaaaaaaattcttttacttctactgtaaactgaatgagtgaaatagtcagttctaatataaactttaaagcgcaaaaactaaaagagaacgagaagaaactaggacagacttctaaataatatttataaactcgttcaagagattagagaaaacgaaaaaatcatctggaaattgcgttaagttgattaaattcacacattttgtaatgggtcaaaacgagttaattagtcctactttttctataattatccaagtcatcagatttactatccaagcgaacgaactaaagctcctcgaatttactcgtcatcgaatagtcctagctacaagaggcttcatatgttgaacatcagaacatagtttgattatcaagcaacacatatcaatcatgcatgacttccacgtcaccacaaccttaccacgacgtgttacactatgagctaatgagaaatatttctctcagaatctggtctaagttatcaaattccaataaatatatatcatcatccataattttcttatttttaatatccatcgttcagctattatcaaaaaacagccatggccaacgacgtgaccaaagatccaacacccaaatctggtaagaaaaaatagtttaagaaacatgatgccaaaaaatataaaattctttatcgactaattaaagaaataattaaatcagattttatacttaatttaatttgatcttgtccttgttattttcataaattacattgaagacattgtggaggatatttacttatggaggaggaagaaactggccttctctacactcctggtctcaacatcgacatggattttacttagcttttatggtttcactaccataaccattgtatcttggatcggcatcgcagtcgtctctatgattttcctctgggggagtttacttcgccttctcagcaagtaattaattattttccatttcaaactatttgaagatctcatgcaagaaaataagtattttaaaataaatttgttgtgtcaaaagatcattaaaaacaccttaaaacccccataaatttaatacacatactcaaagaaattctgatattaaatataatttctgattcgtatatgtttggtttcatatgcactagctagttgttcatgttataaatatagtccatgtttgaacggaacactttattaaagatggtcttataaattaagatgattaattttcggacagggtcgaaccggaactatcaggattagaagtatcggaggagtttgtagtggagacagtgaggtcttgtcggatgctaatggaagaaatggttagatggatgtttcgagtcggtgctgagagtgaatggtttgttttcgcgagaaccgttttaggtttttggatcttgtcaagaattgggaaccttctcgatttccatacttgtctcttcatcggtaagtaactaattttgtagttactgattaatccattacttgtctcttcatcggtaagtaactaatttagtagttactgattaatccattattagttcattagattaatttaattattaatcatctgtttaccattaattgttaatggtcgtggtaatgttcttaatatggtcatgcgctttgtggtctagtggcaacacgttccaagtttgattcacctgctgggcaaaattgcaatacattttcctgaacatccacatgaattgcaataaagtcagaatgcttttaatgctataaattcatattttcatcagaagattatagtctttactgtacaatatattttaacatgaaaaaagaactacattaaaatacattagactatgtgtttttaagatggtttcaagtagatgtgattcatgtttcttgattctctgatacaggtttggtgatggggttgacggttccaaagttgtgggaagagtacggagatcaaatacagaagcatttgggtagccttaaagataaatcgaagggagcgtataatacaactcatgagaagattttggaaatgaagaataagttacaccatggtacagaagagaaagtgaaaaaatcagagtagattttacttgtcttttactgtaaaatatatgtgttacaagttacatatatgtaaattgtaaccaaatttggtcgactttacctgtgtcttttacagtttccaaacaaacaaaaaaaaaaaaaaaaaaaaaaaaaaaaaaaaaaaccaataataaataacagaaaccaaaacaagatgagaaagggaaaattgcataaaagccatatcgttataagtgtaaggtgatttactactctctaccaaaaaaaaagtttaaggtgatttacaagtatgtaattctgttgttgggcaggcgaagatattagggtccgtctcataattgaagacccagtatattttgttgttgggccgagctcggcccttaaactgataaaaaaacaaaacaaaaaaacacgaaacattttatcagagccaggtttcgatcctgggacctgtgggttatgggcccaccacgcttccgctgcgccactctgatttgatgttaactaagctacaaatatgatatgtatacatttactttaggtaaacgttaaatagcccgtattttactgtacgcttttattcttaacttcaaaactaatttgtttccgatacgatgattaaacgtttttctcctttctccaatactgtatttaacgttttcaagagacacaattataagttgcgtggcagaattgaaaattttgattagtgtgtaacgacaaaatcgcaaaatgataaaaacagaatgcatggataatatctctgctctgctcaatcggtaattccttcataaactcttttaatcttaccattgttgaaaatatttttgaaaaaagaaaaataattaacaagtggttcattacggcatgtccctcatgactacaagtaaagtctatcccaatcagagtacattaggtttcatgctgaggttgtatgatcatatcatttgcttgctttggttggcttcaaaaataatacacaatccattctctgaaaatagctcgaaaacttctcaaccatagcaaaaatccgagtcgattctgtggcattatagacaattgatgcgaattcagattgcttaatttgtagatgcaaatagcgagaatgaataataccatttgattattaaaaaaaaaaaccaaatagatcctcaagagttaagtaaactatccaagaaaataggaatttttttttgttctcctaaatgcatttaggtcttaaaaactagcttccttgttctcagacatcctccatttaaccggtggctcaagctcttcctcctcctcttcgtcatgaagattctcttgtcccattggttgcatcaagaactgtccttcctctgtttgttcttgaccttcttgtaatggaggctgaagcataagctgtgtctgaagctgatcatggttgatatgaccatgctctgtctcttgacccatctgataagcatcaccaaagcttcctaaagcaagagatggtccagacaacgaaccaccagcaccttgatcattcacatccatttggttaaaacccgtggctgtaaccgaaccattgttgtctattccgtaaccattgaacatcccttgttgatctcctctctccaacatcattgcagccattctctgtgcatcagaagctatgaattgcaactgctcatcttgcggttgttgatgatgatgttgctgagacatgtttggttcgcgtatcatcaaaggttctccttgagggatcactcctggtggcattccttccatagacatcatgaaattgggaggaggattgttacctataggaggaagataaggcggcggaatcacagcatcgggtcccaagtaaccaacaagctcttctttagcagtgagaagatcttgttgaattttcttgaggtattgttgtaaaaaagaaatgagaccaacacatccatagattgggtcacggatacgcgcttccgcttcataaaagagggaattaacagtgtcttcgcgttgatcaggtggaagatcgttgaggatcttggttacattgcttgctccaaaaactcggtgaacaaagataaacttttgaggattagttggtggaaaatacggcgcaaacacacattcttgagtgcatttacgcctcaagagcttacatgctgcacaaggtgttgaagccatccccacttaagacacaacactatcaaaaatttaagaatggaattaagacaaagagaacaagggaaataacatgtaagaaatatcttgaagcacaagaaacacaaaatcatatacgttttagctttcaacacaagaaaccaaaaaccaggcaagaacatttacatcaccctttgaatcaaccacattagatcaactttctcaacaacaaaaaagaaacagaactatgaaaatttaattatgaaaaagaaaacatagttatgaaattaaatcaattttcaaccaaatcaatcaatctatatatatgagagaattaagaaatgtgatcaaataaaattaaagaatcaagaaatcgcacccgctcgttcgagaacaccgatcctgttctcttatgaccttggaggatggtacctgaaataacattactatttagaaaaattcaaccaaaaaaattgaaatcagaatgatcacctaaaataatatagaattactggatttttgggagagagtgagagaaaatgaaggagaaaaaaagacagagatttgccaagtacagtgcctgaggaatcgtgaagattgattacaaaactaaggaacaaatgacggaaatgtttctgagaaaattttaaggagacaaaaatgagatttagaaaaccttaaaacacatcaacaagaaagagagaaagatagagacatcgtgttacaaagttacacacgtgtggtcaaatttaaatctaaaccgcttatgcaaattgtttttttttttgtgactgataaaaaatttgaagtatcatttgataagttagcaatgatattttaagctgcataattagtagaagactaattcaaatttcataggaaaagaaaatcaaatttgtttacaatggagaaaaagtgagttatttttagatatttcttttatatttttaactgatttactaggtcttgaatttttaactttcaaatttagaatctaaaaaaataatataccccattctttagcattttttacaagaactcttcaaataaagaatgagaaattagcatttaaaatttgtgaaatttatataaaaggatcatttgaaaagtataattcattactagttacgaatagtatttttactgtctctaatacatcattgattcaatatgatacaatgtaattagtaaaacattaattaatgataacaaaagtgtattagagttttaatataaaaaatattagagtctgtaaatatttcattgatttaaacttctacaatataatgtattcagtgaaggtacaacctgataatgcagaagtttgacaactgaaacatagaaaatttaacttgaacgggttatagatatttcattcttgtaactaatattctttagtaatttacatgaagagttcatatagatactagagaatagcttattcttcctctctattttttgcctccaataatagcattataaaagtataaaattgaaagagtaaagaagataaatcaacgttcctaactacttttcattgatttaaacttgatgaaataaaatcaagaacatttactttaaattctctaaatactttattgatttacaaaacttgatacaatattaagagtcaagatttagttgataataacacaagaatattatgtcttgaatttaacttgaatggttgataaatatctttaagaaaactaaaaaaaatcttatttagtattgatactatttatttttttaatacattgatacttgtaacttatgattataattatatattataatatatgttttatagttttatataagttttgtgattttaagacattatgatcaagactttaaatgcaaaataaaaattgttttgatgttaataatattattcaactttaaacttgaggcttggtaaacttaaaaatgaaatgtgctttgaaaatgctataagccataagctataagagccacacaatttacttatttccgataaaaatcaaaaccgaagcaaaatagaccacataattctgatcttcttcatctctaggtatatggtttatgatattacaaaacataattaacagcaaaaatttagacaaatatttctttaactccaacacaaaagtacacatagcattaggttattcctaagatttctgggcttctggtcctaaaatcccattcactactgacgtagcgacaagaactccgacgaactcagccgccacgacggctccagcttgtgtcaatccattaaagctaaccgccgtcacgatttccttctctgccgtctctacacctctctccgccgcttctaatcctttctccgccgcatcaacgcctttctccgccgtctcaaagccttctttcacgatctccaccgcttcttcttctgctttcttcagtttctttcttataccaaataacggaatattctccgccattgatgcaggctgaagtcccgtcactaccgtcgctgccgtcaacgaaaataacagattcctgcgagaggcgccggtcagcgagaacgaagaaagcgcgggtttgttagaatgcgccgctcgtgggctaacatgcgcggttcttgcgcaacgcgcctgaagagctccactgccgccgctgagtaaagaaagcgaaacagtcgaagccattttttagatgatctcacaagaaacgaaaaaagctctcagatgtgaaatagaaaatacgaaaagttttgataatatataagataacaaaataatttcattgtcaattgacgtgacacgtcatctccattgagattctttgataaatgggtataaaaaagattataattaaagaataataaaacattttgtacgttaaatccaatttattttatttattttcaatccactttcagccccaaaactcagcaaaatagattttttctgaatgaaaaaaaaataaaaaaaatccatgtacacaaattagacttcggttttgggtcttcttgttctgtctctgcttttatataacttgagttctgctttgcttctgtgtttctttaaatttattataaaaatggaaaagattgagttttctaaatgagctccaagtagctgtagagaagctaatccacagctacggagtcctagttatggtcacgttgttcctaagatggatcgcatccttcgctgcattgtcagtcatatgtttcagatttaaaatattttgatcttatgtataagtcttcttcttattttttaatatatttattgcttatattttgttttgggagtcttttgatgatactggatcaaacgaaatggaagtactcaaacaatatgttaacttcgctattagctccttacctcttctgtagccttcctttagttgttttccaattcttgaggtaacaattcatacacacaaaaaataccttttgttgttgttcttgagtatgtaacaatgatcggattaagtatttgatttgtattttcaggaccgggtttgggacatggatcgctctcctcagtcattctcaggcttttcctcccaaaccgtttttctggttaacaaccttagaatagtaccaatgagatttgaaacaatattagttacgatattaatagtcttcagtgttgatatatagtaatgttagagaacagtttgcgatatgaatatttattctatttaaactagtaaaggtaggcaatccggtttagaggcttcgcacgattactcgttactcgttactcgtctagtacacgttacttgcttcgtaccaccttgagaaaataagtacccgttactcgttttctctttatcattttatatacatacatttcgtattgtattagtttttaaaaacatatttaaaatttagattaaaaaaataaagtaaattttaagcaggttaaaaacatgacaaatcatcaacaagtactcagcaagtaactcgcaagtaatacaacaagacaagtaactcgtatgtaatcattttttagcaagcacttgaaattaggggtacagagcaagtcaagtaacaaagatccctaaaatagcggctactttgccttgtgcccacacttttacagtttaaaactttaaatgttttagtttttggtttctttggggttaaaactgaaatcataaacaaccaactgtaacttgtatatatgtttgctatcggttcagatattgataaaaaagaattaaaactattttaagattacaatcatttaatttgattatatccccttttaaattttaatacgtatatttttgaaataatattttttttcaaaaattgtttgatttgtttgtttgtgtttttttatatgaaattaagtggttttataaacaaactttggttcaatttggttttaactactttgatttgttttcttttttttacttacatttaattattaatgttttgcacaccccaaatcaattggtgtctttttgcagactcgctagagcttccgagtgcaacgattcttcttactgtggttacaccaaatttcttagtggaaatagtcagagacaaactaagagataaaggaagtgtgtgccttttcacgagcatgtactttctcagtagtcacactaaagcttgtggcttctttatggttggtcgtaactcagttttgcatcaaatattggaaactttccgtttaaggaattataaagatgtattattgtttaatttttcggttttgatgattttgtttgcgtttacatttgaagaaaaaacgaaaaaaaaaaaatcattgttaatttttaggggtgggcatttcggtttaacttcaggtttggtttagcattttgcaatgtagttttggaatatcttctcaagactttttcaactatggatggcttaaaaataattttagcagtccatgacaatgacaaaatcatatacaaaatgtcaaatctagatataaagaaagttcctcgtgttgaatccctttttggttatcaaaaaaaaaaaaaaagtaaccataaatacgaagacttcggttttgggtcttcttgttcctttttataacttgagttcttctgctctgcttctgttttttttgtattttggcttcttttagttcatattgaaaaatggaaaatattgagtatctgaatgagatccaagccgttgcggggaagctaatccacagctatggagtcccagttatgatcacgttgttcctaagatggctcgcgtccatcgttgcagtgtcagtcatgtctttcatattttaaacatttggatttatgtttaatttttaattttttaatgttggtttacttcttttatttgtgtgtaaagttttcttatgatattggatcaaacgaaatggaagtactcaaacaatataatggcttcactattagctccttacctcttctctagccttcctattgttatttttcaggtcttgaggtaacaatcaatacacgcaaagtactttttttgatgttgttgttcttgtgcatgtaacaatgatcagattaaatatttcgattttgaattcgcaggaacggggttgggaaatggatcgctctcctcaccgttattctcaggctttttttaccaaaccattttcatggtatgtaatcttataacatctagaacataaataatcttcaaagtttatattatataagatataaataatcattctattaagtatcgtatgggtggataacccgatttacggtttggttcaaatctttttgtgtattgcttaactaaaagttaataacaaattgcagaatcgctagagatcccgggtgctacaattcttcttattgtggttacaccgagtgacataggggcaatattcagagacgacctgagatatacgggaggtgatgtgtgccttctcacgagcttttaccttatcaataaacacactaaagcttgtggtggtatcaaaaactcattcactcaaaaggacaaagtcacttacagcatttgtttgtggattctgtttgtctaccctattttgtcctcatttgctgccctcttctacttataagaacgcaacgatcttgctgatattgtgatcagtggtcttataagctggcgaaagatagatggaaccgagttcttatgccgagttttgatacagaaagcaactcccaagttcagaataatgtttttctagtaggagtaaaaaaaagaagtataccgaagtaactttgacaacccattttttcgatatcagttcatatatatgagaattaagacaggtatcttaaacctatatatatgtaatacatatcgatcttagttttcttaaacacaattttctcatttcaattttcaagtattaaaagtaaattatgaactctttataacctgaactaataatttatcattttcttacataaccaataattaggaagatcttgaatgattatggaaaaagagatctatgggccaagacaaccttacatcattgatgattgaaaaatgctgatcctaaagctataatgggaagtttcatggcaatgtcaagtacaagcttttgccattgaatcttggcaacaaaacaacaattgaatccgacaaagtaaaaaagggtatcccactccttgagaaatacaaaaaaaaaaaaaaaaaagaaatacaaaatgataaatattaaagatcatacaatatggaatatttaaataaatatctcatttattcaaaattttaagaaaaatagtttttgtttaatgtttgtggctaattaatcaaagtctggaattaattcccactaattgatcctataaacactcatataatacaactactatgcttacaaaagtaatctttctttattaccatggaagttcatttgctaaaaatggattttgtacttaggagactaaattttgaataaaaaaatatctaaaaattaattttgaaggttttactcataatcccacattatataagaaaaaaacaaatttagaccaaataccaatttaatctttttctctgcagtccatgatttgcctgttggtctcttcctactaattgctttagacaactttgcttgttccatatatatacagcaaaaaaaatcataataataattactaccctttagctttccaaagttaagtaagagctttgaccaatattccggatcttattccttgcacacacgtgatgtaaccagaaatttgcgttggaaattaagtttcaatctgtttcttatcatttatataaaaacaatcggataaaagtgaagaattatactactcagaaaattagaagaaaaaaaatcagctaattagtctaaaacgtaacgacgaccatttcaatatttataactttaaactttatcagaaaagttattcataccttttgggggtaagactatgagagattaatgtatcatccatgaagcttacaaaagcgtacgcagtgctgtgacgttctctttcttctatttcacgcaaaactttacaagttaaaagagaagttcctgattaacttaatgcaaaagagaactacgcataatttaaaatcaatttcacaactaaatcaataaatagttccttataaactacgcacgcatatgccacgacacaagtactatatatacagagaccaaattattctgtaagaataaaaaacacacattacaagtgcattatagccaacaagcgtattattaattagatattccaaaactacaagcctacaaccgccaagtcatcaccatgcctatctgtttctccttccaatgcacgagaaaactcagaagcataatcaagtattaatcaattttctaactagtaatccaccattccttcagtacgtaattgtcaaggatacaatcgtatcatgttttcattacctcaatatcttatttccttgttcattagtctttctataatcaccttaacctagaaccttctagtactcgatgtatatatatgtgtaacctcttttgaaaagatatgcaatacacaatattcacagtaatgaccaaacagtattaccttagtgtgggttgaagtttagtagttgtattcatgaactgtttaaatacaataaatagaaatttaatagggaacacaagtcacttgtggttggcatcaatgtgcttagttgacaattaaaaccattgacccatcatatcatcttcatcatttaaactccataacagctaaacagccgtcagttcttaataactatacacttcaaaaataagtacatgatatattttggtcaaaaataagtacatgatatatttatctctaactcttttatacttgcctcttctccaacaacttgtcgatttcaggtaggacacgcttattaacgtagacacgtcattgcgttcgtattattataacgtggcagatttagccatgtcatatatcccaatcactctgatttttttttgccaccgtccccgtgaagatcaaccaattctagtttgcccaaaaaaaaaaaaaaaaaaaagtttattttcaacttattttcttaaagaggttttttctaacgtcttactttattactttgttaatttaaattatggattacatatgtaaacattgcttataagtcaatttactataattgtccacacacaaaaaaaaaaaagattacatagttttggttttatcgataggacaactaatacattacaaatgtttaggtataacaatgtaatcagaaaactatgtataacaatgaaattacacttactttctttcataaaatcttacacattaactaataattatcaaatctgttttttctttataagttaaaaaaaaaaaaaaaaaaaaaaaaaaaaaaaaaaacgagtttcactaaatagccccattggtgcagtatcaccccattggtgcagtatcacatgaaatttcttttcttggaaaaaataaataaaaatttgataaatataaatattaacgtagaaaattgtctgtattcagttaattttggtatcacacttatgttctaatagattttaacccgcggtataccgcggagacaattcattttttaaaattaatatatatataatttgtaaattattttatagtttacaattgttactaagtaacgtcctgccaaacccgtcccgccaaacccgttcacaaaaaaaaatatttattttattaatgttgatcttatttataatatgtttatgaatcattgtcaaaagattttattcgttgcgggatgttgaacccacacatttttcgccaattagttaatatatgttcattcttaaaatttcgaatcacaaaatatgaagaattttgtttttagattttttaaactctatatattctataatgatgttaagtttttttgatatattaaactttttataaatttaaatattattaatgttttatgaattttaaatatataaataataataattaaaaaattaatattttttgccttttaggtaatgatataataactctaaaagcaagaatttagaagatttaaatctttaattaaatattttcatacctaaataattaatgtcagtaccatgacattgtaaataagttcaaataaatgatttgtttatttaaaaaaaaaaagtttagtaagaacaatatttatttaaacaaaaaactttgttttaaaatattgttaacaaaatacttttatgctaattttaagggattgatgtgaagtttgtttggattaaatttgattgataatgtgattgacaatttaaattaagaatttaaagtaaaattaattattttgaaaaaaagatttaatgctaatggcattgggttgtaaataagtcaaactcaaagatttatttgttaaaatggctgcaaaaatgtatatatagattattcgtgaaaataaaaatttaaagatattcctctgctttttaaagaattaataactagtattaaagtaaaatataaaaaaaaatacccgtaaagactatccacaaaaaccataatcatgctcgacaatgaaattaaataacattcaatggttaaatctcgtagcttcttggccatcaaaatcatagggcttagtgtatgccaaagctaatcatctcttcatgtacgaaaatgaaagtaatactaataaatgagaaccatatatgaaatgcatggtccttcctttttatgatttattaatattgtaattattatacgttattatcagataataaatttcagatcatgcaacttatacacatccccacatcgatcaccatcagacatatactacgctttagccaaaattaaatgcatcacgaacataacatttgtggttgatgtgaatagaatagaatacagaagtaacaaatctactcgaccaaaagttgaacggtaatataatttactattcaatattttcaattttcaacaaaccttatctaacacttccaactaccatacgttgataaaaattgttagtttattagtcaatttgcactcctctattaaaaaaacattggagaacttgttagtttatagtcaatttgcactagttctctattaaaaactttttaaaaattaacttttagggtttaaacacataaatagctgagaaaaatctagatatatagaattgagatttaaaagaaaaaaaacttcaaaaaatcaaccggaataacatttaaacagtataatcctttttgataaactacgaatttactggtcgaactacatacatttccctaagcaagatacatttcctagtttaacgcttcagcctaaatatcttactatttttcaaactttttatcgactgcgacatacatacttacattctcatatcgactggtccatttatctatatccttaataaactgtctattaacccaaaagaagagccgtcattagtcaaaattgagcaaacgaatt

SEQ ID NO: 272 - DNA, 92049 bp, Arabidopsis thaliana
gaattccgaatcattggaaaaaagaaaataagtcccttcacttggttgatctggacagcgtttgcttgaagacaagcaaactatctaggttcgggtcatgagtttcgtggggctaacatcaaatcaggggaaaaacgtattttcatatctaggtttggtcaagagtttataacaacatcgttttaagtgttagaattaaaattttatagagttgtacaaaaaaattaggtctcgaactcatgatagttgtcgatcaaatgttaataagctgcctaaatgagtgaaacgtcgtggcttcaatatctgatttttacaaaattttgtataactttaattctaacatttaacacgatgtcgttttgaagtataacatcaaatacatgtcatttgactcagcaactgtaacagttgactaatactcgttatttacgattttgaattaagcactaaatgtaaagtttagctataaaattcaaatgtttttggagtttgggtatgaattcatccttcaaatttgttttggtatgaaaatacactttgtaaattgttcgggtataaaaaaacccttgtcccagaaaataagagtatggtttttgaatttctaattctctgttttttttttctacttttatttggaaagtcttattcaaggttcttgtgtgttcaggtttgttgatttggaccacctcactcggtttcttctaggagttgatgctctgaagtttatgatcatattcctgatatcatcagagtgcaagattcctcaaagtagtacttactactagaaaagttgatggtacattactaattagtttgttactatcatattatgtgatatgatgatatttaatataataaagtaaagtttccacaaaactcaagctatgagaagctaaccgtcacatttttttcaaacttaaataaactaatatctattttagttagtgttattcacataattatacttataagctacatataagaaaatatttagtaggtaaatattttttctacggatgtatcaaaggtaaaaatatcaaaaatgtgtcagttttcaaatttaggacgaaaaaacttaaactttcaaaatatcattaaatcacaattttttttttgaattttttaatatagtagcctcggattgactgattattgtttgtacaaaattttggtgtctcgttttctctttgcatatgcaatgtgtcacatggatgtcttatgtggatttgatactgatatgttgtaacgtgattggtcatttacctaaaaagtgaaatttttctcaaacaatgatctaaattgaaatatagtcggactttttttttatgctaagaatataaatatttcatatgtaaattaggagaatggattaaatttttaggtaacacttaatgtattaaatccattctcctaatttacatatgttaatatttacaatattatcttctatttatcatttttaatttaatcaagttattcaaatctatttatttttttgtcaaaatttcaaatcttattaatataaaaaattatttgagaaattatcataaaacaatctaattaatatgcattattattggataacgatttttggtatttaaaacaatctagttcacttaaatctatgatagattgttttaaataccaaaaatcgttatccaataataatgtatattacaaatttaaaatagtgcttcaaaggaatccaacaagaaaaataaaaaacaacacaagtacacaacaacaataacaacgcaagtaggttaggtacttaggtagcaatgcatgcagcctgattcaaacgatctacatatgtttttaaataaaagatcatgtcatttgattcttcccattgtctattttctataataagtaggttaggtatcaacgcagcctccaaaagcataaaaacaaattgcaaattttccagtggcatatgtatatattagtcacttgaatttcattaaataaaatacgagtagaaacgttgacaaatattacgagtaaacaaaaacaaattggactttggaagcctttacattttgctcacgcaagtaaaaacaaaaggaaaaagaaatactcaattatttgacatagtagaaataagatattcatatgaaagtgaaagccatttgatctttcaaaggtttaatggttttatattaggctaaggtatgcttttcaaacaattgtttaactaaaaaaactgtagatacaaaaaaataatcataatttcagcatattgcaaataagattgtttgttgtgtattacaatttacaaataaaattatatatcgtaagtttataaccataaacagaatctgtctttaattttttagaaggtcacaactgaggaaagaaaataaaagtttttttaatgatttataaaaattacaaaagttaagaaatttcaaaataaaaatgtggtaaacaaaacttcttttatttgttaagacattgctataattttttttcttattaattatttagttatactgaaattaaattttatataattagctgcaaactcataattacttaacttagtctaaaaaccagttatggtcataaactatatattatgagaaaattagtcagtcttacttttttttatgaaattatttcattgcaagttatattcaatctatagataatgaatatttatttaataatcatgataagataagatcaaatatagaagaaaatatacacaagagaaaaaaactaaataaaaagtataattaaataagtacaagtcattatccaaaaatatccaccactcgcgtaaaagcgcgtggaagttaaaaagtcattctcctaaatgaaccaagtcttcaagtctcaactacttcctaaagacaattagaaatttagaaccaaaacaaacgaaacttctctgcaatagccttctccaaatttcctcactttcacgcgtttcagtcttctctatataaacttgtttcatcaacccatcaaaatcccactcaaattctgtttcagtgttcttcaaattctcaatctttctctcaattcatctaaagggttcctcaaagtttcaatctttctctctgaatctaaaccatggctcgttgtagcaacaatctcgtagggatactcaatttcctagtatttcttctctcgatcccaatcttagctggtggaatctggctaagccaaaaagggtcaacagagtgtgaaagattcctagacaaaccagtgattgctcttggtgttttccttatggttgtagcaatagctggtctaataggttcatgttgtagagtcacatggcttctttgggtttatctctttgtcatgttccttttgattctccttgtgttctgtataacagtttttgcctttgttgttactaacaaaggagctggtgaagctattgaaggaaaaggttataaagagtataaacttggtgattactctacttggttacagaaacgtgttgagaatggtaaaaattggaataagattaggagttgtcttgtggagagcaaagtttgttctaagcttgaagccaagtttgttaatgttcctgtcaatagtttctacaaggaacatcttactgctcttcaggtaaaaattttgactttgatgtgattttaaagttttgtaactttttttttagggtttttagtgaattgtgtgattgagaacttagaaagagattgagctttttgatcctttaaaagttctctttttgtgatctaagaacttttgattttgacttgaacacaaaagccttaccttgaacacaaagtttcaacctttttctaatttgagaatcatgaattatgaatctgacccatagacatatgttttagttttgaacttcgatgcatatcaatatgttgttctccttttgttaaggttttactgaattacctacaaaagtttgttgaattgctaacaaaaaattgttctaattcttgaaaaaagatttgacctttttgatccataaagttctcttttttagtgatctcttataaaaatccatttttctagtcaaaaactttactttttgattaaaagtttcaaccttttaaaactgagaatcattaaacatgagatccaggaccagattcttacttaagatgcaagcaattttgtaactaaagttctgctctgttcttagcacttttatatgaattttgtttgtttgatagtttctaaagctgaatctttgtgaacttttactctttcttaaggctataacgttaactaacgaatctttgttttgtgttacagtctggttgctgcaaaccttcagatgaatgtggtttcgagtacgtaaacccaacaacctggaccaagaacacaacgggaacacacactaatccagactgccaaacctgggacaacgcaaaagaaaagctctgcttcgattgtcaatcttgtaaagcgggtctactcgacaacgtcaaaagcgcttggaagaaagttgcaatcgttaacatcgtcttccttgtcttcctcatcattgtctactctgttggttgctgtgctttcaggaacaacaagagggatgacagttattcccgtacctacggatataagccttgaacatagtttatcgggttttaggacagagattcgttgatacattgttggagtttggttttatgtttgatgatttttatctttggtgttttgatgagacctattgcttgtacagctcacttatgagactattatcagtatgttctgccttttgggctaaaccttgatattgatttattatatgcttttattagtttattgtttctctattcatatcatgttcttttgttcttctccttgaggaacagagaagccacatttgtgacaatgactatacactgagctggagagaagaaccaaaacattaagataatagtctcagagaaacaatgtaataacacatcaaacataatgaagaagggttcttgatacattgactagtctctcagagattgatcaagctgagatcacctcacatacatcatcatctgagatcacctcaagagggtaatcatgaagtcccattatggagacagtgagaagcatctcggtcggtttgataagcttgaacgtgcaaacatctcagaccactaaacctaaatctttcaccaaacgaatccatcaagcaataaatcttgactgtataaaaccaatgaccttatacataacatcccatgacttgttctctttcggatcatgaatctctaaaatcgttgtctcctttggcatatgcatctcctcaaacatcttcgggatcccctaaataacaaattcttattggactatataattcacatttatataaaccaaatcttacactgtatctttgcttctctcttaccaagaatgaaaacttacaattacaacattaagaagaacgtttcagaccttcgtcgtctaagcatctccttaccgtctattcagtagatgcccacgcgaaagcacagatttcctttgtgcgtaaaggtaagaaactcgttattacctaacccgttatggttcaaaaacttgtcccagcaacttttctccatgtagtagaaaattaagtttcttaagattttgattggccatgagcttccccatgacactttcaacaccatttagccaagaactccttttccgagatacttttgatgaagttgagagaggaatcgctctcttacgacataattttaggtttatggaatttttggccgaacttgtcatagtctagtctagtggtaaatcgttttgggacaggagaatagacatttctgccccgagtttgattcctatagtccaggaatggattaacctagagcatagtgggctgcctctcgctaagtcgaacccttggattagtcgggtccgatggttatattagtttgtcctaataaagaaagtttaaccttggtttttttaatccaataaagtaagtaaaaactataacaataataataataatgacgataggtttggggttaagtaagtttaacatgcaatttttggttataagccaaaaaatggaatatttttaaaaaattaacgaggaatacaaatttgtggctgggatatgaacgtacatagcctttttagaaatatgtattttgtcaaacaaacaaataatcagttctaattccatcattaaaaaaaaagaaccgaatacaccaaaaaaaatatttcttcggctcaagagcctagtacttaaagaacattaaggtttaaaaggtgaagcggactaaaacaaaaaaaagtaggaggatctgaatgcaatcagcgtgagactacaagcgattccaacaacaagctccataacaaagcatccaccactccacaagttataatcaaggcgattgatcgactgattcgtgacacaattctcaccaaacgaaagcacaaaactatggtgacctaatgcaaagttggctcacccttgaatgatctttcaaaattatcctaggttcttcttgctttttagcatttttggtaaggaataactttcatggtaagctctttttgtaaattttacaaaatctctcattccttaatgaaattcaaattcataataaataaataaaaacccgacaacattggcagtgcttcattccagatgcgtgattcacaacacaaatgcttataaatgaaaattttttatgctaagtctgaactggaggattcttacactaaaaaatcaaatccatataaataaaataaaaaataaacccgacataaaaagaattcttgtggcaaaaaaatgtaaatattcattaaaataaaaacggtttaggtttacaatcttggattgtaagcctaaaaaggacgtaaagttgtattaagtgaagtaaatattgcgtgttaatgaagattagtgcttaaaagtttttaaaggaaacgtgcagagaagatgaaattgtctctcacgaggtccatgttttttgggttctgctttcttttacgtaattgaggacatgaagattagacgtcttccttctttaatcggcaacaactagaggttacgggaagatatcatcactctcaagtccggtttggtttatcagaggatttgttttcttgacttaatttgagatttggtttaatataatgtagtaagtgattagtcatatatatgtgacataacttcagtatcacatttatctaaacataaactcatacaaattagttaattaagattaccaaatataaaaggttaaatccaaatcaaatgaaatttattcttattaacattgatgtaaaataaacaaaatttacaataagattggtaaacaaacttgcatggtgattttttttttatctctatatcaaccaatattgaacacatttcttgggttgccaagacgtttcaaacttttggccccataaactctttccccaaccccaagtaaatttagttgttttccctgcaccaaactcgaatgcatcatgatcttgagtagccaaaatatttggaaccgactcgaaaaccaaaattttcttagttttaaaccgatcttaaagagtacacacattaagtaaaccaaacgaaagattaccaagatcccacgaaaagccgttaagttttttttttgtatacattagtcacgttatcatcagttgacatagatcatctccctataaataagacaaccgggacaaataacccgagatagaaattttgatttgattttgatgaaaaatggaaccacaaattctttttctctatctctcactcttcattctctccctaaacttcttcttcacgaatcttaaaccaaggctagtccgcctcttccagccttctttagaatctcgtgtcaagaccgctcttttatcccgaaaggaagtagccgcgtttcttgattctcccattgtcgaagacgaagaaggcgaagaaagagaagaggaagaagaaggaggtatcgtttcaaatgccaactttacgtttgagtttgatccatacatgatgagcaaagccgaatcagtgaacaaagctctagaagaagcaattccagtcggagagccactcaagattcatgaagccatgcgatacgcgattcttgcggctggaaaacgtgttaggccaatactctgccttgcttcttgcgagctagtaggtggccaagaaaatgcggcaatgcccgccgcttgtgcggttgagatgatccacacgatgtctctaatcaaagacgatttgccttgtatggacaacgacgatttgcgtcgtggaaagcccacgacgcacaaagtctacggcgaaggagttgccattctctctggtggggctctcttgtctcttgcctttgagcacatgaccaccgctgaaatatcctcggagagaatggtttgggcggtgagagaattggctaggtctattgggacaagaggtttagtcgcgggacaagcgatggatataagcagtgaaggtttggacttaaacgaggtcggattagagcatttggagtttatccatgttcataaaaccgcggttttgttggaaactgccgcggttcttggcgccataattggtggtggatctgatgaagagattgaaagtgtgagaaagtttgcaaggtgcattggattgttgtttcaggtggtggatgatattttggacgagacgaagtcgtcggaggaattgggaaaaaccgccgggaaagatcagctcgccggaaagctaacgtatccaaagttgatagggttggagaaatcgaaagaatttgttaagagattgacgaaagatgcacggcaacatcttcaagggtttagttctgaaaaggttgctcctttagtagctcttactacttttattgctaatagaaataagtgattatatatttgttttgtttgtgtgtgttgggtttatgtatacatgctaaagtagtgtgttcccttatttttaagtgtaaccacattttaagatgtttattaatgaatatttaaaaatgtacataatttttataacatgcatgtaaagaaactcaaacgaaaatatatcacactcaaagaaacaaaactacaatatgagacatatatctaaatctaatatggacgtagcagtggacggttatattttgtggaggctgattatcttctctcgtgttatcgacatcttggtgtggtactaacaacaagtaaactaaagagctttaccaaaacaaaaaaaaggcccattccaaattttagaacagggccaaatattctgattgagccgcccctgtgtgtaaagtgtaacgcgtgagaccaaggttttactagaaaatgttcaaaagaatattgtgtttcaaggattcaaatgttttggattctaacgtaaaatgatgtaaccattgaaaatgttgaaatgttttgtgtacacaaaaactagatttcctttataaacaagttttaagatcttgaataatttggtatttggtaccaattagtcggtcttctaagaaagaccgccaaaaacactctggtccagaattagttatggttcagggtgtttcacttctccttggattcctttattaatcagaagagccatcatcgactttgatagctttaatgaagggaacaattccgggtccgcacgactcttaaggttttttcgaatctttagagtagctcgtttggtgaacctcccatttgttgtgcatagtctcaagcttgcactgtccactccttactggttgagagacggtcattggatattgaccgttttggcatgaatgaaaataagaaaatgatggtgtagatcatagactatcctaatctttatcaccataaatccataatcatatttgttacataactataatcctaaccaaagtaaaatatattttgccaccaatccaatggccgagcccatccatttcgccactaggtagagtttaaaagtataacaccaaacttctttaaaaattcaacttggacacgaatcttcgtacattagattttaacgatcaagaatccatttgctgtctttgtatgtgacctaatgtcctaaacatgttcccatttttatgttgttgttgataaaatagaaattaatgaatggtgtacaattaaatggttaattgtatccatccgttttggagttcccgtgtcttaaggtaatggaacaagcaatgtgaagctttggatgatgttcttaattaatttcatatgttatctttgattttcataatgtttgtttttgttatccatatagtttgttatacattgtgatgtgtatctctattaaaagaatgcagtgaattcgacttataaagaaaagacaaaaaacagatcgattactctttacggtattgatgctagaagccaagggatattcccttccataatatatatgtttacaagaataatttgtcgtgttatctcataaaaatatgcttttctgacgctatcttggatcggaaatcatttgtatatatcaatttgttggaaaaaaaactaaattaataaagagatagtaattttacattttggtcaccgaaataattctacaggttatgcttttttttttagaataatgacaaaagaaacatcatgcaacgaacaaaaaatattatgatctaatctaatatagttatccaaaataattcaatccctaaccctaagtgaaagattatatattctattttcagcaaagccttataactattcttgtaaataaatctaacctatataagttgaacaaaaatttgaaattttaataagagacaagaaaacaaattatcaaatgaaaatggacgaacgctcttgatttgtcgcaacattctttactagtccacacacgtccaagcttatggtgacaattttcttaagtatcacttgtgttattgatttggaaaggtcagcaggcaaaacgtagtaaaatttataactgaatcataaatcttgatcactaaaacttaaatcgttgaacctaacattaatataacaaaatggtctattttctaaaatttgatacattcaacatagtctttttatttagaaattgtagaatagtcagttaacccataacttagcttacctcttacattataaattgataatagtaccctttttgtgcaaaacaaaataataatagtatttggatgtatatcagctatcagcattggttgggtctaattatttaagtggccacttgctggcatcaccattagcaccaagtcagtgttggtattgtaatcatattaagcactacttcttaggcataattgaccacttctatctaattaagtaaattattgttttttcaaaccaatttgctaatgtaataaatttggatttctgttttttgccaaactatttgtcaaatttgtggacattgcttgtcaccttccaataagtttgtaactagtggctgcaatactatgcatgtgtcagtatataacttgtttagtactctaataattttaccaaattgttaattatagctccccaacaatcgggagacttcttaaagcttgacgaacatatgccgaaagtataaacgacaaatagcgatcattcaaataacgttttctttgaaataaacacgttaccgaccatatggtgataaaatcgtatgtaacaaataatgttatacatatttttatgttttgtacaaataacatgagatttcgagtatattataaaattataacaacatgtttgaaatcaattaaaaagtatattttttgcaaaaaaaaaaaaactctaaaaagaaatatcatcataattaacccaagaaacgacaaaaaagaaaaattaacacaaaaaaaatatgtaattttcttctgttaacacaaacgtttatctgatttatataaacctttcaaaggattagtctttccatagcaatgtatcccaaaaagatattcgtttggttcactccgaaaactaaaaccttaattcaaaaatttgatagttttccattatttttttgtctagttgtgagtttgttccatcctaacacgtgaagtgaacacttatctatttgttccacttgcttgttcttctatactatatatttttctcaaccatccaaaaacatgcttctttctttttcacttcatttcacaaatgttttgtgtatgttcaagattcttggtattgttgttctatactatatgtttctcgtacattggaaaccataactccatactcgaatagaaaaaaaaaaaattaatctaattttaagagaaaggtttcttttaaaaaaaaatttttccttttaaaaaagtctttttccttttaaaaaaaaattttggtaaatctttttatgagttatgtgtatgagaatttttgtctctacattttggagttcgattttcgttttagtttaggatggtgaagtatttacaaaaaagaaatctatttgcgaacctaaatatcgaataatcgtatctttagatgtagatggattagtacatatcgtgatatcgatagatccacacatagtttgtaacaaaaattatcaaaatgactactagtaaaagtgtatttatcaaaataatctagtagttagttaaagttgatttaaaaagaaaaggaaaagtatgtggatccacgtcaggttgcgtgcacgtaaaagtcttttcattccctagttcttctgctctgttgccgttgtgaacaaatttaggtttctaaaaacaaaaactaacacttgttttgggaaatcgctataatcgaacggctacgataccaccgcaaagctatcacctctaccaacccgaacacgtgtacgtctctcatcacttccacatttctcgcgagaaaaaccaaaagagtttcgtaaaaaaaacgaatattcctgctgtaatattaatttctcgtgtacgttccgatatacgctgacgtgtacgagtctctttatttttaggtttaaaaaaacaatgttattatttgtaaacagtatataaacccttttagtctctattgtttcattattcagtcgtaaaataaaaccgaatttgatttttatttttctctctcaaagtttttcttgggagagcaacaatggcgatgaggaagcttttatcgaagaaactcttcaatatcacgaatgttgcttcacagagtcttatgaattgtcgcatttcgtcttcttcgttagccgtacgaaccagagttccgaatgattcaacagatacaaccaaaatcgcaccggagcctggagatttggcgatgtcgcgaaggttcatgcataacagtgctatgattaggccggcggagattatgcagatgccggtgggagagagtttgattgagaaactccgtgagattgatggaagcaaggatcggattcgattagacggactttctccgccggagagggagacgagtttgacggtggcggatacgaagaagctgcttagagcggcgcagatcgagattgtgaaatcgaagctaagagaaacgggaagaagctggatgccgtataaggagtttgttagcgtttgtggtgaagcttcttcagatccagatctcggatctaaaatcgcgaagatgcttgatgattcagcaaacgtcatcgttttgggagattccgtttgtattagacctgatcaggtactttcttcgttcttcttctctagccttttagcattttgaaatcgtgctttgtctctgagatctctctgagtattgcagctgattgattgggagagataagagagagatttaaaaactctctgaaaaaaacggattaggttctcaaaagtttttgttcgattttgattttggaagctataccgaaaactgataccatttttattcggttggatctcttttcttttggttccaattcaacaggagaatcaaaaacctctgtgtttttaccagagttccataggaggttcccaagtttgagagagatggtgataaagaggaacagtttctacagagaccacaactctttttttttcccctaaaaaaaaaaccattggttggattagggttataaattgagtcaagaccctttggtgatttgataccaaaacctaaacataaaaaaacttcaaaagagagagttgagagaagcttactaactggttcttgggggttattagaaagtttatagagatgatgatgataatgggttgggtttatgtggagggattagtcaatagtggaagatcttaaccagaaacagggatatggggatggattgattgactttataaactagtcattgattcataaagatgtatttttgttgtgtgtttttgagtgtgctaattgtgtgtctcaaaagaaggtggtggaggtcttgttttacccagacattttctgtttttgtcttttgctattgtgtttgatcaggttaccaaatccattgaaggactgcttcctttgccaaagatccataacccaaatgaccctcggagaatcgagtttaaagagcttgaagctgaaaaggcagtgatcgatgtgaaagctcacactttggtgcggaaagagctttgggctggtctcggttacttgatcctacagactgcggggttcatgaggctaacgttttgggaactctcgtgggacgtgatggagccaatctgtttctatgtcacgtccgtgtactttatggctggttacgcgtttttcctcaggacatcgaaagagccttcttttgaagggttttaccaaagcaggttcgaggcgaaacagagaaagttgatgaatgagtatgagtttgatctggagaggtataatgaactgaagaagctgttttgctctaagccttcggatcatgtttccaagattcttggagctatcaagagttaaaattttgattaggggaaaaattgcttagattcaatgttgttgtcacaaatggtgtctgattttacctaactagagaattctaccccaaaaaaaagtaagaaaaaaacgaatgggtactactctcaaatttttcagttttcgaaaaaaagacaaagaggttgttcttattattgcggcttatgtaacatcagcgaagagttatgtttttgttttcgatttttattttttattttttttatttttttattttatgaccgatctaaaatttaacattgtgtaaataaatgtttgaaggtgtaatataatacagaattaattatctgcagatttcatatttgcaaaaactaaatgagatctatttttttctaacaagcgtttgtgaaagtacaactacatttataatttcgttgtcatgttataaatcgaatcaaatccgatagcgtgattctcctccgtaatgggacgggtttttgtcacataataaattaataatatcctttcataatttattaattttaattaataatagtggagaattgaccttttgctattaatttttatgaatccagagaattaatactattgaataaaaaaacatttttttagctcaccaaatattggaaaatattataattacatatatcaaatatattattatatcatcagttatataaaatagatgtacatattacatgaccttgtgtatgaaatatacgttgtcatgtatttaacatcatagatatataattttggtatacagataaattaattttaatgaaaactaacactaatcgatcggcgttcaccaacaaaaatatatatcaaacgtttaggtttgactctctgcaatttcttttcctttaaattttataatccttcgggaatctagtttacgtttaaaacgagcttttggcatcattttatctaccaaaatgtgttgttgtagctaatcaggcccaatatcagtttagaaattaatataatcggcccaataattaatcaaaacttccaaagaaaatatatggaaaaaaaacgagaaaaaccaaaagtcagatatagcctggaactttctttcccaacaacagtaagactctgttttttcccaagatgtctggtttcctcttttgtttcgtccaaatctctactttttagggatcttgtccttctcttttctgctgattaaaaccctcgaatttgctccaattcgacgcgaaaaaggtaagttttgctctttaatttcactttagttctgatccatggatctgcaattgattcgatttgcctttgtcggttcaaattcaaatcgatcgtcttcgtttctaatttgagaaagattaggtttttaattatgggtttattagggtttgtccaatcttatgatttagagcttttgattgattcgaatttagggtttttgatttgatttcaattttttttttttgaattagggcattgagatggtgaatggagaatcatcaactagtacgtcttactctgatagtaacaatgacacaaatgatcaaggaggagactttgaatgtaacatttgtttcgaactagctcaagatccgattgtcactctctgtggccatctcttttgctggccttgcttataccgttggcttcaccaccattcacattctcaagaatgtccggtttgtaaagccgtggttcaagacgataagcttgttcctctttacggtagaggcaagaaccagactgacccgagatcaaaacgttatccgggtttacggattcctaaccgaccaacaggtcaaagacctgagactgctgctcctcctcctcagcctgaagctgcgagtaattttttcaactacggtattggtttgatgggtggaattatgccgatgatggcgactacgaggtttgggaatttcagtatggggtttggtggtttgttaccttctttgtttaactttcagtttcatggatttcatgatgctacgctttatggttcaacaccgggttatccttacggtggttatcataacggtttccgtggagttcctcctcgtggacaagagcgtcctatggctcgtggaggaaaccaaagtgatgcatttctgaagaatatcctcttttttgttggaatctgtgtggtgatatttctcatctggtgaaaacgaatcacatttggtgtatttccaggtatgatcaaacttacttacttggtgcaagttgtgtatgtaaatatggtaatagctgagtgtacttgtctgctatttcgacgttgttattgtatttttgttttgaagatgaaccgtgagtctacaagcttttttacacaactcttttgttgcttttgtgttttgtctaagcatcttgtgaaaactagttgtgaaataaatggtgcgtgttatgacataagaagtattatgcttataatatttgatagatcattactttctttgattctttaaggttgatagatgctagcttttatatagaatatagtttttaaactgatttctgctttataaacgaagaacagacgttgaatctagaacatgaaaagctccccttaaatgtgaaccagatcagtggctaaattaatgtgtttaggaatgatttgctgtgtcggtttagttgtttgttttaacaactctattttaacatagaaaagctgtgtgtagtgctctgatctcgtgagcattcttgtgcgagactaagcttgttcttgtgagttgattcacgtagtggactgctgggacagaacatgacgataagggaatcacactccgcgattcttgttcttcttctgatctctcagatctcgaattcactctgtttactcgatagtttgttaggtgttcacacattgctagatagttgtagattgatgctaaattgctaatatcgaaacagtgaccctagggatgacttctagagcatcacttacccgtccttggcttaaaccagtctcaactacctctccctttgtaaataaacttttcaacatgtaaaatgtcatcttctgcgtgacggcgttgcagacaacaatgaccaccactataggtaagttttgctttagtgctattccatattgttgttctgacaataataacctagaatccttcatggtttgagctcatgttgggtcgtagtgagaatcaagaaatgaccaatctttttctcagcagtatgatatgaatatgaacataaactggataccacccattttgcgtcggtgattgcgtttaataagactttattttcaacgccctctcgctgaaaaattattagcaacgtcatacatcaaaagttgttaccaatgaatcattttagttggttactgtcggaattaaaccagaagagatgaagagaaaaaaagacaaaagcctttatgtcatccctctcacgtcgtctttggcggcttcaaagccttcatatgattctgaatcacacacaaaaaaaagaaaacaaaatcaatggtatgaatataataatttatccattccaataatttaatgaacctaaaatattcatttactccaagaaacagctgacttactagaaacagttgacttttcttcttcaccattcctataaacccaatcagaaacttcgcaaccaaatcttacagaatcacgatgatctcgttttcatttcatctcctcgtcttcatcctcctaagtctctcttccttcgcaacagcacaacagccttatgtcggaatatcaacaactgattgctctgtttccgacaacacaacctctgttttcggctactcttgtaatggtctcaacaaaacttgccaagcttacgtcattttccgatctactccttctttctccaccgtcacctcaatctcttccctcttctctgtcgacccatctctcgtctcctccctcaatgacgcttcaccttcaacttctttcccttctggtcaacaagtcattatccctttaacttgttcttgcaccggtgacgattcacaatccaatattacatacacaatccaaccaaacgattcgtatttcgccattgctaacgacactcttcaggggctttcgacatgtcaagctttggcaaaacagaacaatgtttcttctcaatctttgtttcctggtatgaggatcgttgttccgatccgttgtgcgtgtcccacggctaaacagatcaacgaagatggcgtgaagtatctgatgagttatactgtggtttttgaagacactatcgcgatcatcagcgatagattcggggttgagacgagcaagactttaaaagctaacgaaatgtcttttgagaattctgaagttttccctttcacaacaatcctgatccctttggtgaatcctcctgcaaatactaactctctcattcctcctcctcctcctcctcctccacaatcggtttctcctcctccattgtcgccggatggtaggaaatcgaagaagaaaacatgggtctatgctcttgccggagtactaggaggagcattggttttgagtgtgatcggtgcagccatattttgcctgtctaagaagaaaacgaaaacgcaaacgcaagaggaaacgggaaacctcgatagcttcatgggcaagaaaccaccgatgtctgatcaagaattcgatccgctagatggtttgtcaggtatggtggtagaatccttaaaagtttacaaatttcacgagctgcaatcagctacaagcgatttcacatcgtctagctcgattggaggatcagggtacatcggaaaaatcaacggcgatggcgcaatgatcaagaaaatcgaaggaaacgcatcggaggaagtcaacttattgtctaaactaaaccatcttaacatcatccgtctctctggattctgtttccatgaaggagattggtacttagtctacgaacacgcttcaaacggaagcttaagtgaatggatccacacgacgaaatcgttactaagcttgacacaaaaactacaaatcgctttggatatagcaacagggctaaactatctacacaacttcgctgatcctccatacgttcacagagatttgaacagcaacaatgtgttcctcgacctcgagtttcgagcaaagattggtagtttaggttcagcaagatcaacgactgaagatttcgtgttgaccaagcacgtggaaggaacaagagggtacttagctccggagtatttggaacatggtttagtttcaactaagcttgatgtctatgcttttggagttgtcttgttggagattgttactggtaaagaagcttctgaattgaagaaagagatcgatgaaggtaaagctattgatgagattttgattcatggaagattgttacctgaaggattaacaagttttgttgagagattagtggtggattgtttaaagaaagatcatttgaatcgtccatcgatggatgaaaatgttatgtctttgtctaagatcttggcggctacgcagaactgggaagaatcgtcgtactaagtttaaggcccactattgtttgggcccaaggcccatttagaactagttagaccctttgtttttttttttttttttttttatatatacaaatgtcattaaagatttttagattttagaagcttatgttatgttgtgttggagttggtcacaaaaaatgtagattggtcaaggctgttaaatatttagtttctatacaacatgaattatgagaatgttattttagaacgtattcataccaattagaaattattattttaaatgagattacgttaaaaatcaaaaatatatcgcttatttacattttttttttaattaattttgaccaaaaactaagctaaaaattattttcaaaatatcttgtcctcattttatgataaaagataatatcttctcattacttcattttccagataatgaaatacataaaatgagggaaaaattagacaatgaaagaaacttgaagttcgaggctttggtgaggatagaagaacaggctgtcacgtttgggtagtcgatacacgtggcactttaagacacgttgattccgacatggaccacaaatcccacgtggccatgaccatcctttgcctggctttgccacgtggaccctattaaagtgagtttgtgttttgtgtttcataggaccactatttgtttgatagatatgaccaagcatcgactcatccacatataacacattacataaaacacacggcgtttttttttgttttttttataattctattaaatatgtataattattttctttcaataataaatatttaaaattatatacataataagtgtatattagtcattttaaacaaaatgtgttgaaataaaaaacgttttagatgaatatattgttgagttgtggaggtgaatgctttttagttccatatctctaatcgtaataagatttgcagtgacaaaaaaatggatgtagttctcacaaaaataatttagagtactagttaatcttcaacatgggagatatatccattttctgtcgttgcaaatacttaggattttaacattgattcaaaaattaacaatattttgtggttttaaatatttgtaatgattccaaaattatgttttttaaattgaaagtgtattattttaatgacaaagacatcttattcatattagagcttaattaacatctttaagtgtcattttaatttcataaatttatgatatcagcatatgatacagtttattctttcaaatctattattttattttaacataatatttacgtatcatctacataaaaataccaactctcctggtataattttacttaactaaaatgtaaacacttcacattgcataattatataataatttactgattatgtgacagcccaattttaaggtttttttacctgctcattgcatatctctttcctatgtcatgcatggtcctaagtcctaactcttaaggatgttgaaaggcctgaattaaccagtttggatctgatatattcaaagtcaaaattgcacatttttatgtatatggaccctttcgtattagctatacctttgaaccatctattttaaatattgacagagacataattataacaaatttataaataatagtcaacttgaaacacaatatattgtaagaaacgtacaatgattagttatatagatgtcgcagtggtgtttaattttatgcaaacaagttatatatgattcttgactaagatttaaggatcaaaatctataaactttaacctagaatggtctaaagtaaagctattccatgtcttgaaaggacaaatacaagaatatattagtaaagaaatatataaaagcatgtcatgcctagattttgaaactttccatgcacaatttcatatatataagtaataaaatattcatattgatacacaaacaaatgcgcaaaccgaagacatgtagtgagtttgtggtcactccactatacaaagcactcttaagttgcaaaaatgagtgtacttaaaaggcgggaataaaacaaaacaaaagcatctaacaccaaagctagaaaattttaaacaaaaaagattttgtatatcaatatttaataagaaaaaaacccatatcgcctccattaaaaacaatatatcacaaaaacacagcaaagacagaaaattagacaattttgttttccgaagtatctatcaaagagctaaaaataagagatcagaaaaataaataaaggagaaaggaacaatttgattgacaccgaatggacaaaaagtggaataagaagggaccatcgcatccattttcgttagtccttttgtgttcgtggtataatattagtatcactcacccattaatttaaaatcaatgttagtttgctttaagtgattttatcaccgcatatatattcataaaatgattcaagtatgtagtacctgtatataataatcaatgagaaatacctaccgattcccgaaacaatgcatatgatgagtttcaccttaagaaatcaaagatattcgaaacggaatcttttacgaatttccgatgacattttgacggtttcattattcgtcgaagaaatttgatggttttttcggttgaaagtcgcctgttttcttgttatttttaacatcaccatttcaaaaaaccaatgtcacaaaaaaacaaatctcaacaaatgatcatttgactctagtcagatattaggatggtgatcttattagaagtaattttctgtattcttgaatgaaattgataaacgaaacaaaacaatgaccatctatataactatacaataaagagcatgcactatacaagtatacagtcaaattctattattcttttatttgcagaaacgactaataaaaaatcgtaaatagttggttcatttatcttgtatgtttttttccaaagatgaatttttttgcatgtttttgacaaatatcatactatcatttaatctgataatacgttattttacatgatatcacactatttatttcaatcacaagtgaaaaaaacatttatggttttcccattacattgtttttgtcatttgaagttatctacgccataaatagtttatttgattattggttctaatttatttatttcttggcatgatactcgaattgatattctacactattctcacaagatttttaaaatatttttggaatattgattgagcctctctcttaaaatatctccaacgatcaagtgtgttacagtatatatagataaatttgaaaggttaattagtttaacaaagaaacaagatgctttattagattggatgatgagaaaaagaagagtttggatgatgaacacaagtactaatgaatggactattattaatatgataattacgtatttgtagtttaatcatttattgcctttgtcttggtgaacttgaaagtttctatattaggatacacatggcatgttaaagagcttttaatgatctacgagacgtgtaagtatttgtatgtctatataaacaaccatacgtacgtgaacaagtgactctattttcatatattgtcatttcaactaatttttttttatctactatactacaaaatagaatatccccattcagtaacatttaatttaaggatcctagtccatatcaaatatatagcttaagttagaaaaataccgattatttggattaaaattattgtagtagaactgtagaaccgaaagaacttgaaaagaagaaaatagaacaagctaagtgaaattatcatgaaataaatgaaacgagcagaacaaacgtattagatccagagtattttggaatttgaaatgatataataactaataaattccttacaattcatataacgcttttgaatgagcaatacattattctgttagagtcgttttgattagaaaactaaaaggtactatatataatgtttcttcactaaactttaactaattgtataagaagttaaatttccaccgtgttctattttttcataccatttaagtagccaatatatttagctacaaattgctagaacataccactttttgtagcgcgtagtctaaaaatttatgaaaaatttgctattttggagaaaaattaaggaaatctctaaattttagtctaaattaaaaaataatattctcttaatctgaaaaaaatggagatctatatttggaattggaaatggagatgggttggagaaatcttactccaaactctattgtgaagatgaaaatggagatgagttgaagattatcttagttctacatataaaaaatttaagaaagttatttacaatacgcctttacaacctatatataagattttcaactcacaaattttgtatcgacgtttattttttagtgctttgttaatgattcatcgacattgttgtatccagtattgaagaatcaatgaatgtgaggacgagaggagagtaacgtgttgatgaagttacaaagagatatttggaagattttgcaaccaccattgaagagactaaaaccaaaggatccattacatgttttgagttacctatctattaaatgcgtaaaggaggataaaggacacaccatacgtgtgaaaaaggaggttccacacgtgatcgatggttgtgcatacgtgtgagttaaggggtgggattcacgtgagagattcacccgaccaaaaactatttttttcggaaaacaaattttagttttcaaacatagaaaataaatcgaaaatagaaagatactggtaggagtgaagaaggttgggctgtcaactgtcaatcccatttgcagttagaaaaaaaatatgtgaaaattaaaatcataaaagtatatttggagaattttaatgtaacttctttctttgttttctgttttaattttctgctatttcaaggacgtgagctatgaaaataagattttaggtggctggagaaagttgtgcaaataaaaaagtggcttgagaaatatttctaattttgattatttacaaacttaaattttgatttagttcgatgaaatattaatcatttacttggctgcccatgaatcacgattcatataggaaatgtaaaaataacttacacatattttctcacacaaacaaatgtgttttcaaaacaataaataatttggtaagcgttgttggggtcacttaaattatgttgatatatataaggtggggagaggcaaaaatagcacgaagtttcaattatgaagtagctgaattggtagaaataaccaaacagttttgaatttaggaaatagtccaatttcttataggcaacaaaaatattctaaattatccgttagcaaaaaataatatttattgagaaatcacttgcattaatttagattaagtaaatagttcaaacaaaaatttgcgtgctacacaattttcgatttggtatctgattctggcatgatagattccaacataagtctccatagatatatatacaagtgggcttttcacttttgctttcaagccttccattagtatttatcctattgtggatttataacctacatagcatatatccaacatgtctctctaactgtttgtgggatggatacgcacgtcaaatcgattttggaaatttttttttttttaatatttaatatacctaggataatgtaatgactaatgatacgttaattttaacagaaaataattgtgtttgtatctatacaacgtcattataatgtatggctgaaattaattttataagtataggtttagaaaaagagatagctgaaggtgtagttgtgaaactacagaaccataaaatttcgttttttccatgcattagttgtgtgtggatggtttacatattacaaacatcgatgatggtgaaaggctatcggccgaccgtgaaatcgtgcagaggattaatctttggattttagtaaatattttgtaaagatgatttggaggtttagtcatcaggcatgttgtcataacatcaaggttttttttaaaacaatggtatttttaaaaatattattgttaaagggatattttttaaaatgggtaatctaaaaagcaattttaaaaaaatttcaataatctttgagtgataaagttttattaattaatatagatataaaataatattttgaaagttgagagtatcgtttaacacagaatgagatatttcctaatcaattaacacaaaatgaaacaacctcgatttgcagctagatttttgctttatcatatcaagcttgaggtaatctctaatgcttttttttttacgatttcgtgatgatagatgtaatatagcggtttctgcaaagaaatttaaaataattgatttagccacatatgttaccaaaatgtaattataatttgatcgatttttatgtatttcatttgtttcatattataatttgatcgatttttgatatatcgtatgattagttaattgaataaatgtacatacatgaaaaagtagtctaaaatgacataggtctcccctaaacaacaaatacacacaatattaaagaataaaattagagagcatcataggaatattatataagtatttaatttgtcaaataagaatattttattttattttattttggctcgaaataagaatatattgaagcacaaaaatatgtggaagtatttatggtggtggtttggttcattgagatatgacctttggactcaccttatcttcctattctttttagtttgctttcataaattagtttccaaattaactcctttaaaatgttgatatcagccgacatttccgtgataaaaagtttttttttctcttataaataaataataacgttgacaaaaaaaaaagacaagaaaaaaaaacaaggataatttcgtaatttcaggatgtgtatagtttttttttgtctttcctcctcatcgttattgatatgaagaaacctttgccgattaaaattaaaaagaagatgtttataaaaatacttcattataaaaaaatgataaatcaagattttaataacaaaaaaatattaaagaagattggtgggttaaaaagggaggcgatgaagaaagaacagcgacctcttcttctctcttccctctctcttcctttctctttgggagagatttttttataagtttttggttttgcagaatttgctgaataaaaactctcactaacagagaaatataaaataaaaagagtactcaagaaaaagaaagctagagagagaggtatagaagaaaacgatagctataagctcatcatcaatcatttctttaattctctgcaactccaaggtacttcctctctctctctctctctctctctataccatatatgtagatgatgaccgaagctgaaagtgagaaccttaaaagagttacaagaaagagattggagaaaaactgtataatacctagttgactcctctctctctctctctctttctttttcttgtattttttttttgtatgtgttatataagattctctgtgtatgtctgaatccttacaggatccaagagctttggaaaaaagatataatgaataacaagatatgggtttagctactacaacttcttctatgtcacaagattatcatcatcaccaaggaatcttttccttctctaatggattccaccgatcatcatcaaccactcatcaagaggaagtagatgaatccgccgtcgtctccggtgctcaaattccggtttatgaaaccgccggaatgttgtctgaaatgtttgcttaccctggcggaggtggcggcggttccggtggagagattcttgatcagtctactaaacagttgctagagcaacaaaaccgtcacaacaacaacaataactcaactcttcatatgttattaccaaatcatcatcaaggttttgctttcaccgacgaaaacactatgcagccgcagcaacaacaacactttacatggccatcttcctcctccgatcatcatcaaaaccgagatatgatcggaaccgtccacgtggaaggaggaaagggtttgtctttatctctctcatcttcattagccgcagctaaagccgaggaatatagaagcatttattgtgcagccgttgatggaacttcttcttcttctaacgcatccgctcatcatcatcaattcaatcagttcaagaatcttcttcttgagaattcttcttctcaacatcatcaccatcaagttgttggacattttggttcatcatcatcatctcccatggcggcttcttcatccattggagggatctacacgttgaggaattcgaaatatacgaaaccggctcaagagttgttggaagagttttgtagtgttggaagaggacatttcaagaagaacaaacttagtaggaacaactcaaaccctaatactaccggtggaggaggaggcggagggtcctcgtcatcggccggaacagctaatgatagtcctcctttgtctccggctgatcggattgaacatcaaagaagaaaagtcaagctactatctatgcttgaagaggtaacgttttcactcaatattttttctctaaccaaactaattaattttctatcaaacttttaatgaaccgttctaatgattgaattgatcaaacaaccaatttcatatcaatcgctacaaaattttatttttcttcgtgatttttttcttcttatataattaattctaaatcgaccaatattttcataaactctatatatgttattttcttaaaaaaataaatgtatagagaatgaccgactggtacaagagcacgacacatgctctagttggtaaagcctgattacgcaatcctactatcacttatataatttttctaactaatatcattatatggtgttatatggtctaatttgatatattaatgcatattttgtgtcacgcgtttggtggcatcgcttaatcaaatttaacataagaaattaatatatgattgattaagtgatttagtcttcacaaccataaattttaaattagagtttccttctccatataagctagccaccttcactacgtaaccaaaactagtccttgaagttacttcattatttatcttacaatttattttgtagttgacattatcttctttcaagaatttagtatatgttccaagatagcataaattgttagcaagagaagataacacattgaagtatctaaacgaactaatcacttgaggtttatattttatcttagaaattgagctaataaaaaaaaaacaagaactcatctatgtatagttcatttatttaaaatttaatttgtaggtggaccgacggtacaaccactactgcgaacaaatgcaaatggtagtgaactcattcgaccaagtaatgggttacggcgcggcggttccgtacacgacattagctcaaaaggcaatgtctaggcatttccggtgtttgaaagacgcggtagcggttcagcttaaacgcagctgtgagcttctaggggataaagaggcggcaggggctgcatcctcggggttaaccaaaggggaaacgccgcgattgcgtttgctagagcagagtttgcgtcagcaacgagcgtttcatcatatgggtatgatggagcaagaggcatggagaccgcaacgtggtttgcctgaacgctccgttaatatccttagagcttggctattcgagcattttcttaatccgtaagtccattttctaatcccttaataatacttacctactcttattcttcgataatactaatcttcttgaatgttgactatacattataaaatgtagactaccataatgcattgataccaagactttaactaatatacgtttattaaacttaagttatgaaagtgacaaaaaaatttttttttttataactcttttgttatgcgggaagatatatttctatttcaatcaaaattaaaagctgctggcttttttagaaaaccaaaataatttttgtaaaatgaagttccgtttcttcactgagtttgattattttatgtttattactactaataaaaatttaaatatcaaatattttttccttttcataccacccataagaatggtcagctaagagtactccaaaataacaagggtaacaattcattgactaggagactttcatgaaaactgtatgtttatatttatattaatgtaggttatattgcatggcaaattaaagggtttaaataattaatgcaacaaaagaagtttgcagagtgagatcgcaaacttttatgctttgggatcataatagcatcctaagggtttctctgtctctgcctaacctttcctttatagtttttttttctttaatttgctttaattcattccacatactattatcaaaagaagtaacaatgccattaacataactacaaaaaaataagtctcagatttgtcagtggtacagtttcattggtatattgtcccttaagaaagacagaaatcaaaaagaggaaaaaaaaaatctaaaagctgaaaaaagcaatttcttctgtcattattcatcagtactttctctatttaatgtctgcagaattttactattttgttgttagtgaagtaaagaagagaagagttgtacagataaatattttgctttatgatgaaaaataagttaagatacaaaaataaaataaaatgcttctattctgaaatcagctttttcttttgtcccttagattctcacgcccttgtaaggagaaagtttgtaccttttcttgcatctacttgattgtgtttttcctctctatctatattcaaaaaaagagaaaagaaaaaaattattggtttagggttctaaagattgtgaagtcattttctggtctctttctcaggtacccaagcgatgctgataagcacctcttagcacgacagactggtttatccagaaatcaggtcagcctttatctatatagatacatacatcaatatttttttaatataatatgttttcatacttatcatacaagaacccttttaattactcatttacatatatgtacttaactcacaatttaccatatatatcaatcatttcatcatgcaaaatctgacatgagtggcttcatgtctattctcttgcatggattttcaatatcacgaatcatttgtttttcttggggttcgttttcttcattaaatacattatctacacttacacacacaaggatatataaaacataggagagagagatgtaagtatttctcaagtacatgaaagtttgaagctttcatttcaatgttaactagcagacctctaagtcttgtacacattaattatttacatcacaagtagtttattacacttggcttcaaatatccattagtatatttcaaccttcaaattgttgttttaacattattatgtttcatgtgttcaaataaaaaaacattattatgtttcaaatttttaatttagaaatttcatctaagcctttcagtaaatacataagttaacatcaaatcaaaattacttgaaacatgtcaaaagttatcttgttcttgtaagaatataatgaaaaatttaatatatatcttctttttaatagatgtctcaaaggaaacacatgtatcataatttttactcctttcctatcattttaacttaaggttttagctatcctattttttttgtttcatttgtttaaactaattttcttcacagtaaatgacttattattttaactttacttaatataaaacaaatgaagtatatacaaaaacaatcaaaaccatatttaatgtaaaaaggagtatttcacatttcattgaaaagtttttttttccttctaaaagttaagtttcttttaatattataaacttgttaagagtaaattgtgattaatattagttcatatgtctcgttttttcaggtgtcaaattggttcataaatgctagggttcgcctatggaaaccaatggtggaagagatgtatcaacaagaagcaaaagaaagagaagaagcagaagaagaaaatgaaaatcaacaacaacaaagaagacagcaacaaacaaacaacaacgacacgaaacccaacaacaatgaaaacaacttcactgtcataaccgcacaaactccaacgacgatgacatcgacacatcacgaaaacgactcttcattcctctcttccgtcgccgccgcttctcacggcggttcagacgcgttcaccgtcgccacgtgtcagcaagacgtcagtgacttccacgtcgacggagatggtgtgaacgtcataagattcgggaccaaacagactggtgacgtgtctcttacgcttggtctacgccactctggcaatattcctgataagaacacttctttctccgttagagactttggagatttttagtcttctttgtttctcaatttattcatcaaaatttattatagtgaattttatttttttggtttatcgatatatgtttttagtttcttcacatacttttaaaatttcctttcttctttagtttttttttctgtcttttctgtcgtaagaagaagagagatatacatatatcaagtgagatctagctaccaaagttccatatataattatgcacatatttttattttattcatgaaacttatatccttacatttttgtatagttttgttcatactaattttttgttcatattaatacccctgccaaattactctaaattttgttttagattatgattatgtacatatattttctggaaactaaatttcgtgtagcatttattggattcttccatttgatttttgctaataagcgacaacagtcttttaggaaagcgccaataagtcacatcactttccttgtaatatcaaattaatcatctcaactaatccctacttactacaactatgtgctccttaatttagtaatagcaacaaaatatacttggtacgtacccgatcgacttattaacaattgtattatcttcagtttatagtaaaatagttaagaaaaacgtgacatatttgtttaaaaagaaaacaaataatcttttgagttaggttctttagtttttttctctgagaaacaattatccaaaactccaaaggtttggttacatgtcatattgggggatatgtcaatcgagacggagacgttttagttctacaaagggacattaagctcattgccatggtgctactcattactttttgtaataggactcattacttgaattgtttacaaagggttttcttaaaagtcacttcaattattttagtaaacaataatatctacgtttcacctaattccttacaactaataaatttctattcgaagtattttatatactctattaggagagtatgatgacactataattggcaatataaatcttacatgatttgacatttcatgttttaataaatgtctttggtgaaaccaataacccggaacagtatttagggagcaacatactttcaagttaatttatcgatccaccggtccataaaggtaataaaagttataaacaagactataaattaaactcaaacaaaatgattttgtacaacaatttgttcgtcttaaactatttccgtcttatatttttatgactaaataaaggtgcagcctgaaattataaactcattaaatgcatatgatatgaatttactaaatacatttatttcaatcgtattgtggtccattttttaacccttcttgtctgaccactgtcctttagctaccatactcttataaaagaatatataaattggaaattttcatatacagattttattcattattatttttggctggtatacaaaagcacaatatagcaacttcttttgtcctttgttatatgaaaaaaaaaaaactaaatgcagatctgaacgtgacaagaaaatcaatatgcatgagtgttagattcttgattttaatattggaggccctgccttttaatgatccatacgcaagcctatatatttatttgctgtcaaattcattgacagactctgtgtcaatgtcatgtttataatttgttttgcatggttttagcccgcatgatggaactttctgtgatgtatccatcacaaaatttcaacaatatcttttcgaatttgtatgttttttcatgagacttgatatagctatacaagttggaatacttgatataactataagttggaatggttacagcagttagggatatatatctatttgaaccattttagtttagagataaaattgatctgcagcggtttgttatctgttttaaaaatagagttgtttaatcaattaacggtttagtccgttttttctattcatccattcaaatcctatgtggttagactggcctctaaaaatttgggtttgtgtcaactttgaacacactataacttccacctagactaaggatagtatttgttaaataacgcaatttgattgtttctttctaaaataagaagtatagtgatcaggttatttagcaaaaagaaaatagtgttgcgatttctaagaaaagtgtttctgtttttatatttttgaatgaattatgtgttcacggtttatttacaaaaatattgttacgatgtttttgaaaatgaaaaaatcataaagatatatatatatatatatgctttttcatatattgaagaaattatagagagaattgttagactcttaaagaatatatttttttttggaacataagtaaaaatgttataagagaaaaatcttttttgtttgttagatgatatttgaacaatgaaaagtggttaatatttgtttgtgatcctttttttactctatgcatccattctctaaagatttagaaccgatttcgtcactaagttaggttaaatatgcgttcgaatttaacgctttcgcagaattatctatacatttcttatagatatcttttggattttaaaaacattttttttatatcgtgatacaattgcaatgtttgaattgaatggagtagaagaagaagaaatcaattttggggtcctaagattttttccggtctaagaattagaagagaggtcggtcccatttgaatggtattgggcttgggcccatggcatcacggaatttagcgatcgccgaatccgatggctaccccatcagacaggtcccctcactaaaaccactaatcaaaattgtttagatattcgacctcacatgcataattacatatgaacaaaatgcctaagtgttggaatttagtttttttttttgtttttaattctgtgtagcgagcacatgttaaacatatggaccatataatacaagagtagagctatgattgaaatatgtttttttttcatttagacatttgagcattttacaatggttatccatgattcaaataacacataaaaatatttaaaacatggttcctcgcaatttagtaaataaaattttcaattattagacttgcatatactggcttttttctaattgattgatgaaccatttgccatattttttttcttttcaataccacaaacaacactcatcaaaaagagtttattaacgtgaataatatattaaaacattatttttagtggtaattattaaaaactagttaactgttcatttttcgatacgttgtgcactaaactatttcgtgcaaattgtttgtttggccatgattgaaagtttcaaaccataaatacaacgttacatgtgtagacaaaataaatacgttatatgtgtggctcaatataaataataactatacaataaatgttttggggttgagaatagaatgattggagaacagtgatggtgcactatcgttagaataattaatttttagaggatagggccgtatctttttgttgtcttacctccatctccatgtgatgtgcatgaaatgtggcctcaaataatacatctacatatttattcacataagtagtttatcttttgtaacccaacatagattcattcttcaatctttattatataaaatagattattgtcatctcagaatccaattgctttaaccatggaacataaaacttagaaacgtatatgtttgatgagctagttgatctgttactctattattggttcaattgcaggtataatccatcaaaattttgaaaaaaaaaaaaaaaactaaatgggcttttaggacaatttttcaacttcaaggtctgagcgccattatcgacccactatcattaacgataaccggaaaataccaaaccggattttagattctgtgtcggttattgatacggtatagcagacccgtcatcatccctacgagtcaattaatttcatttccacaagcgatcttgcatctgagcttaaagatcttaaattgcttccaaatttgaaaacttaaggaacatatggcaaaacccagaaatctttttagggtttgctctcttctaatggcgtttttatttgcttactctgcttctgtccagcttaatgatcctggtattcaaaaatcttcttcttcttcttatattctttctctatagattatgtaaaatctcaacatttatgtgtttctgcagattggtacttttggtttccactgtacacacttgcttgtgtagttaatctaataaactacagaagaagaatcaaactaatgatgatgagaacagctcttagcttgggtgtgttcttgttggttaaagttattgcagaggatgtaataaccgagaaagttggagtcttgtctttagatcttactcatagagttgttagagaaaagattggaagtggtttagtaatagcttccatggttctgcaactacaagcttcttcttcttcttcaaaaaccattgactttggtaagtagaagaaagattcaatccttccaaagagtttcaaatttcaaaactttgattagttttcttaatgattttcagggatggttgcaactgtaatctttggctatggacttcccttttggtttttcacaattgagaaaggagagatcaagatttgattatttccaatgggaaaaaaagttacaagcttgaaggaagatcaatagttccaaaggtgtctaaaagattcaagggcaaaaaaaaaaagtcttgaaggaaaattatcaaaacagatctgcaaagaatgttcctaagaaccaaaatctaacttaagagacctctgcaattagttgctttacaatggcatggatgctcattttcttgttcagatggtaccggtctgcgtccatagtctcgggtgatctcttctcctgcagctatctgttttacacaaatgacagagagatcgttatcggtccaataatttgatacttcttctttcaagcaaaagggagaagaagagccttacatccatactggcgtatagaccgatatgagcgagcggggactccatgctttccacaataacttggtgattaacgagatttggtgagcagctagagattaaaaaagattgaaatcatcagtattgtagtaattgtaaaggttttggtacatttgtattataaactcacctgtgattgatgaatcgagagatgttgccatgagtagtagcatcaatagcataatcgagctcttcttccatcaatctacctatgtcgttgatattagcgtcaatgtccagtatgtagctgcaatctccatttccatacctatgaaatcaatagcaggatttaagttcaagttcagctccagatcttctaagctggaggacaaaaaggcgaaaagatatgtactggtttcgcctcttgtttgcttcttgctgatcaagaacctccccgatgtattcgcaaacaaatgtgccacgcagtatatgttcacaagctcgcaatccccatccctgttgatcaatcagttggatattggaattgaatcaagacaaatgggttaaagacaataactcaaaaaggatcacaccttgctttcagttctaaaaacttctagtttcgcgcgaattccattctgcaaaacccgattctgacatgttctagagcatccacagaacttattgcattcataaacaggataaccctcctgttacattttcagaatcgacgacaacaatcacggttaatcagaaaatgaggatccacaaatatgttgtcaagtaagtaacaacctttaaaaataccacaaagtcacttcaacagagacaaaactaaaatttacctccaagatgatacgttgtttgccatcatatgggaatctacacctcatggattttccatatatgtctctagcgtcctcaaaatcgttaccgaaaaggtatacgtgatcacaagttacaggcgagcacactgaactgcgacagctacacctgagttgcagattctgcaaacagcggacaaaaaacaaggttacaacatggagtcacatctctgtttcaagggtatgacaagctagaacaagtaagatacctcctttacaagatccattgacggatgaagaattgagtttgtaacataagtaaagcattcccaaggcatctcatacggtttttcagaattccaaagatcatcatcgacgacacaaattggaactgattccttaccaaagctgatgtccttgcacaaaaccgcagtgtttccaaacggtctcttactaaaatgatgagcctccatgatacaatggcactcatcaacttccaactcaatattagaatgttgtccagcgtccacagctatcccgaatcgatcattctcttgtcgcgggatcaagggatgtagaagatttgggtctttaacaggcttacatccgttagagcatatgtatccttcctgatgccattgcacttgtacaccttgctcaccgcaaagttttgctgccttgagatatatccggtcaggcaaatcaccgaatttagcctccaaagaggtctcaacgctcaccctacagcaagctgatcgagcagcagacaggatatcgaggttattggggcgatgttttgctttctgaacctttgacaacaatatatccgaaaccacagagcaatgagcatctgttacgccatcaaagtttctactatcatccagaggcggcgatactccagcttcagtgtttccttctgtgccgagcgatttagaaccttgcatcctcctcttcatatttacaccagccctatttctaatcctatatgagacagctccaagactttttttgaatttatttggacgactaagcctaccagatttcatcctatatgtattaaaccttattcctttcttcggaccacgagagccaactagactcggtcccatgtgttcagcttgatggtgacggccaaggtcaggtaataaattgaatttcagcccacagaacttgcaaacaaatttatgtacgccgcttgtattctcgttgttttggctcacaacaatttgtgaactgcctgcttcaggtttctgagaaaactcaccattagtcaaattgcattcagaagcaacggttagcgatttgcactcagaaggatgcacagcttgcacatgtaccagcaactgttctttatctccaaaatggctgccacaaggaatacactgaagaagcatacacttttccgcaaactgcacgtgatgtcgctcctccacatgaatttccaaaagctttcttctcacaaaagaatctaagcaaatagcacaagcaaatccactaaacgaccatttctctttatcatcatcatcatcacaggtattggtgatggcaagtagtcgattaggatattctgataatgatacatcttcttcatcagcaccagtagcgaaaccccatatcctagttaatctctctctttcattggataccaacttcatcaagaattctccaactccagcgtcagcgtttcttgaagcttctgttttcgcccagtcgatctgtacttccattgggacagagtttcttaacgataagacacttttgaagagcttgtagaaaatatcacaagcttgatgtagagccaacttttcctcacgcgataaacaaccccttaagagatctacaaacacttccttcgatattattcgactcttaccattccttgcacgcttaagccagttaggaaggtgctgttcacagtataacgagtgctttgtcgagaactcactgcaagaaatatagctgttttctgagcaagaacctatacacaagttatcctcttggctacaatgttcaaacatctccgtgaagctcgtggctccatggggctcctgtttctcaaaagatggaccttctggttctccaaacggcaccaaatcttgacattgatttgtttctaatgttgacataatttccgatacctttctcttcaccagaaaagatgaagaatcatcaggtttcaccatccctgtatgaggacggtgtttcttgcagtacaaaaacccgggtagagatcggtgcttgcatttggtaccaagaacagtaacccctccgcacataggtgcttcaacagcaggagagccctcgttcttcatagattttgtggtgaaacgagaagctaaatgcacgcaacaataaacatcaccttcattcgcccacctcacacattgccttcctttcgattcaatgaaagctatgcattgctgactcttatttcccgaaccaaatggtttcttcagaactgattcatttatatgttggtcttgcgggtgagacagtccattagtttcttttgtcttcatgaactgtgaaccacctgcttcaacaacaatgccatcccatagatccaaaccattctctggtgtattcattacaggattttcttctttcatcgtctcaggagaatttgtgttgcctcgagaactgaaaaactctgagtcaattgcagataatccttgtggcgaagtatcagactccatatgtgttgcatttgttgtctctgcacgtcgaatctcaagttttggtcttttacgactagcctggacatctgagttaaacacacttttactatccggctgtgctatttcgccaacaccacggcgagatatagagaaccattttgcaatgtcatgcttccacgttttccattctgacaacaacattggttgcattggagactcagaaagtgatttgacttcattccacttgatacaattgtcaaattcctaaacacaaccagataaagtggcttcagttaaggaaacaatacacatcaatgacactatcagcctctggtgaagccattacctcattcagcaattcaatactctctgcattcactgcattgttacatttttgtacccacaaaggaaacgagttctcaagccagattggatccatgtatcgttgcaaaatcatctgaacaacattacacaaagccgaatcaaaccaaaaatactctaaaactttaacagcaaagagagtagcttacgctatgaagcttcacaagcattatcccaagatcatgataacttgtgcttctagtagcttccattgcaaattctttccagattataatatccctagctgcttcagaaacaacctgcaacattaaaaagcgttaaaaccaaatgcaatccaaatccttcggtatatcaaatactgagcttatacctctgaagggaactggtcaactatattgaacatcccaactgtaagcttccgcataatatagcgtctagcagcagttaaatctttaactaacttaagtccaatcttgtgagacttataagcaataggatcaggaaactcattgatggatcgaacaagctgcatatccgcccacgagtaatttttcgtatgcggaaaaaaaatcacacaatacttcttcctatcatgagttggtttgcctcttaaagtcgtcaatggccagtccgctttcgcacatcttattccagcttgccatttacctctccactacaacaccacaacaagacaccaaacattaaccatacaaaaatcgaatttaaagattccgaatttggagataaaaaacgcgtattattattaccttcacccacaaagctattggttcatcttgttgcagccatttaggctcagaaggtgacgactcgccttcgccatttttaccaataggtccggtaaccgtgactaaatcggtactagacttcaccgcatttaaatcagcctccggctcagatttcaccaacaactcactacctgttgcttcctcaacatccacgtcaagaaccaactcatccattttaacttccataaatcaccacttagaagatatttcacttctttaaacccaggatttgatacaaacacacaattctgcaataagaacaggggaatacaaaaacaatagtcaatataaattgctttcctatcctaatcaaatttctaacattcaccataagaaatttctaataaggcattttcagacatacgaagtcaattatattacatgacattgttggtactaatcagaattactaatctaaacaattcagatcttaagaagtaaaactcctaactggggaagaacaattagctaaaaccctgaattccacaaaacaaaatcaacaccaagaaatgaagaattgatctaaaccctacattagaaagaacccaatattgaattatacagatatatataagaaaaaaaaaagttggtccaaagataccaaattgaagatcaataacatgaccaatcaacaaacccaggtggaggtgaccaaaaatgttaaaatgctgccacaaaacaaaaactttaacatttgggtttttaataactatgagagaaggtcaggtaacacaataacttgttaggacttaggatatggaaacagacatggcggaatcaaaggctaggtcacggaagaagaaccaacgaaaaaaaaaaagagagttataaagtgggaacacgaaacacatcatgtatgtgacatataataagaagcaaatgttttttttttaaacctaaagatttggattttgggcatggaagggtcacacacctttgtgatttgatctgtggtggtgcgatgcaaattaagagaggatttggtttttgaatctatgaattttgagatttgtattataaaaggagaaaagaattactatatgtgtgattcttatcttcttctggattatgaatgaagattttattggtcgatggcatcggtatttgggcatgtaccatggccaaaatgtcgaaaatatggaagataaaatattttctatgctagggaatagggataattatttttatgtgtggtttataaattgaattataagataaaaataatactataggattggaaaaatatgattaggtatatttatctatgtatgtatatatggttatgttagctttccaaaataaaaagcaaacaaacaaatagttacacataaatttagtttggattttaaaaattgggtcagtttggcagtattattctctctcttttttttcaaaataaaatacttttatattaataataaataattatgagaaaaaaattattcggaagaaaaaaagttacttgaaaaaaaaaaaagttacttgacatagtaaaggatcagaagcatttttgaatactgttttggtttcttttaaaagcaaattcaaggttttaacacagtaacaattgtttctatgctagggaatagggataattatttttatgtgtggtttataaattgacttataagataaaaaaaaatataatactataagaaaggaaaattatgtgcaggttatgttagcgatgtgattaaaaaaataaaataaaaaatagttacaatttttaaaaatggatcagtttggcatttttattctttcgtttttttcaaaataaagtacttttatattaagaaaaataattgtgagaaaaaaacaaagtaatttaaatgtcagcgaaaatttgttacgaagaaaaaaaagttacctaacatagtagtaaaggagaagctttttttaacactgttttggtttcttcttaaagcaaattcaaggttacacacagtaacaattatttttaatacttaaaattcattgaaattatatattggttggttaaactttaacttgggttgaatggcaatatatcatttcaccaaaaatatcttaaatatatatatatttttaccaacaaattcagtatagtataaaacatgtcactaaaagaaaacagtctatttccatgtaaaatacagaaaaaaatgtttttccaaatatattacaaaatactttttagaaaaatcctaaaacttttaggagtaaacgcctaattaatggctgaccatatatatttttattggaaatatttgaatcaaacaaatattgaagtattttttttttgttaatagtggttgtcgcattaaagatttaagaaatcttttttattgaatttgttgacaaaaaaattataaaattttaatcagcatcaaaattaaaactaattagatagagttttgagatctatagctttagtaacttggaatttgtgtccaaagtttaaaagttgctgacaatttatgaataacggagttaaaaagaaaacttaaaatttttggtgttttatcattagacttaaaaggactatactgaattttggaaaagttactgggtcaagtgaataaaaaaatgttaaaatgcacaaaccatctttctgctttcacatagagatcttatttctcaacagtcaacactaaaggccacataacacaacaataacttgttaggatacatatggtgagtggtaacaggaatgtcggaatcaaaggctaggtcaccaaagaggaaccaaacgatattggattaaatatatagaagaaatttattaagaaacacatcgttgtttgagacataagagatcgaagcaaaagcaaatgattttaccctaaagattggagtttgggtatggaaggtcataccttatgatatgtgatggatgcaagtgactacaggaggttgaatctacgaatttcagatctatactttgcttttttggatacgattcttctcttctggattgtgataatttataggtctaggggctaaggcatcggtatttggtgaatgtaccatagccacaatgtcaaaaaagggaaaataaatttctatgttaggggtaactgttattgtgtggttataaatgggattataagataaaaagataatatagggaaggcaaaaatgtatacgtttcaatcttctatgtttgtatgtaaatgagtttggttttgctaatgattatgttagctgtcattgacaaaaaaaaaagttaaataatagttacccgtaaaggggaagataaatttgcatttggaaaatgggccagtaaatatttttatattaacaaaacaataattatgagcaaactaaattattatcttttaattagttgtaggggaaatgatttgtttctttcttaaactcaaataaccctataagttggatattactactgaataacaacaatggttggtttctctattaccacactcggtacgaatcatcaaagaataaaacatacttaaaaacttcataaacacctaaagaagttactcaaagaacatcgtcataaattacgcaaatcgtaaatgtttggaagattttttacaacagtggttggatatcgttctgaaaaaactagacgtttaagtttatacaacaatggttctaatgagttgaacgtcggagaaaactatgtagtgactaaattcgaattcattataaggcaattttgtttactataattttattgaagttctttttaaaaaagttacacaatatagtaaatgattaaaactttttgaaatatcggtttgatgtccttccaaaaaaataaaaaacatataacgtttaaatcacagtttattaaaaaaagtgttcaaatgagtagaaaaaatgagaaattttttaaagtgattaaattgtaagtcatagttaaatggcaattttagtttaatataatctttatttagctttaaaaagaaagaaatattgtagtcagaaaatgttaatgcaaaatgacaaatgtaacagcgaaaaaaaaaacggtctagttagagcgcatgaatattgtcgtggaaaatgttcgtcggaaaccccgatgttttttgtcgatatatgatattatgtcaatacttataattcttgagcttttttgtcaacttgataatgttcaaccttataatctagtccagatcgagaagaaatattaatatgtgtatcattaataaatcacattttatatctcgcataaaactcatatgtttcattttcgtatctagttctaaagttagttctctctttttcatgaatatgtatggtgtaagaagtgatgaatggagtttagaaatcttcttgtaaatttaagaggcatgtttcaatttccgattgcaaaaccaaagaaagaaggttggacacaaagaatacatgactatcgtgggtaagctaattgtaggcatcttgtagtttcgtggtcactgacttgaatgaacaaccaaccaaaaaaaagtttacaatcatccataagtaaattatgcaatgtacttactgcttttgtagatgaaattttctaccaaattatattgatgattaatatttggattccatatatccataagtaaattatatttatagactcataacttccaaggctccaacgaccgccgttacttctacataaaccagcgtagtttggtttgctttgtagaaagtccattaactatgccttaaatgatttcttgaggcccatatatggtccattatccaccaaacttaaacgtggcacagttcgtatttgtgtattccacactttttcttagtgcatgcatatactcaaagagtagagatagttatgcactccacttcacttgaacttttatcacttatgccacttttttgaaaaaactgatctggactgctatcagttaatctgaatgccaccgaaaatgtgatataccagttgtacccttaatgagttgattaaaaaaatgaaaaagaaattcaaaagctaaataaagaaaatcgagttcggagattctcctcttcgtcgtcgtgttcttcttctttggtcgacgttcatcttcttcgtcggccaccatcgatttcctcatgccgccgacttgaaatccggcgtaaaagccatgaattaggtcagtttcttctcatatttcctttgacattggtgcattgtgattttagattgggattttgaattctatataattcccagctcgattcaatttgatagtttgatgattggtttgcaaagtaaagagtaatcgattagaggttgccgaaacgttatttgaggtgatgagcaaaggaatgtagtttgaatgtgagttgaatttgaattccgagatttcatattaaagatttggggggtttgtgtttgcaaagtttagattaaccaattagtttaacgaataggtatgtattaacattggaaatcaattgaaaggtaacgaattaggttcagtagaatcgagtgcgacgagagattgatttcaacgtatgataagagtacatgtggtataactattaaaatgtttgattggagttgaactggttgtattttcaggagcgatgaagaagaagatccatactaaggtacattttgactttggaggatactattctgaagtgaatcagtggattggtaaaaattcactatatgctatattcgtttaagacgagtagtttggagaagattagctattcgatgttagttgacaagatcatgaagaaggttgcgattgatgaagcttctgtcaagttgaaactgagttacaatctgtctaaagttaggagagagacatatattgtagatgatgaggatgtcttcatatttttaacagaatctgatgaagagagtcggattcctgttttgcatgtggaggaattaaatggtataggagttgagaggagagaggaaatttctgtaccggagcgtcgaagttcagttggtgtaaatgtaatagaggatgatgttttaaatgaagtatgtgagatggtgcatgatggatatgataatgatgtgaatgattgtgagaatgtagtaggtacggagatcgtggctgtcgaaaggccgatggaaaggccggtgaattctgttgaggaagaagatgaggatgataggattgattatgatgatattcacgatattccacgaagtgtagaagttactccgcaggttatagaatgggatgatggtacgggtattgaaattggtcaagaattttgttcaagggaggctgtgtgggaattggttaacagagctgcaaagaaagaagtttttggagtctatactattaagtcagacccgttgagacttatgctacgatgccggcaagcttctaaagggtgtacttggtatctaagagttgcgagaactaagaaatctcatttttggagtgttagagtgcatagaaagatgcatacatgctctcggagtgttgagactacaagcaacagtatacagcgaggcacaccaagattaatagcatcggttttgcattgtgattatcccggaaatttagagaccccaactccaaaaaacattatgtcgattgtaagaggaagacttggggtgcattgttcatactccactgccttaagaggcaaaatgctacatgttagtgatgtgcgagggactccggaaagaagctacacgatgttattttcttatctttacatgttagagaaggtaaatccagggacagtaacttatgtggagttggaaggagagaaaaagttcaagtacctcttcattgcattaggcgcttgcattgaaggttttagggcaatgcggaaagtgatagttgtggatgcaactcatcttaaaactgtgtatggtgggatgttggttattgcaacagcacaagatcctaatatcatcattatccacttgcgtttggaatcattgatagcgagaaggatgtaagttggatttggttcttagaaaagctgaaaactgtatattcggatgttcccggattggtctttattagtgataggcatcaaagcataaagaaggctgtcaagacggtgtacccgaatgcgcttcatgcagcttgtatatggcatttgtgtcaaaacatgagagatcgtgtgaaaattgacaaggatagagctgctgtcaagttcagggattgtgctcatgcatatactgagagtgagttcgagaaagagtttggtcattttacaagtttatggcctaaagctgctgactttcttgtgaaagtagggtttgagaaatggtcgaagtgccattttaaaggagacaagtataacattgacactagtaattctgcagagtccattaatggtgtgtttaaaaaagcgagaaaatatcacttgttaccaatgattgatgtgatgatttctaagttttctgaatggttcaacgagcataggcaagcttcaggttcttgtccaatcacagcacaagttgtgcctactgtggagaacatattgcacattagatgtcaagttgtagccaaattaactgtgtttgaacttaacagttacaaccaagaatacaacgtgattgatctcaactcggtaagttttctggtggatttgaaaatgaaaagttgttcatgcaaacgttttgatatagacaagatcccgtgtgtccatgctatggccgcagcaaggcacctcgcccgcaaggaagggagaaatgcgaatacaaccatctacggactctgctctgtgtattacttgatagatagttggtcattggcctattaccggacgttgtatgtagtcccacattagtcggtttgggttcttcctgcccatattaaagagttagttgcctttccgtcggaatacacaccaaaaggaccaggacgaaatcaagagaagcggtttccatcagctggtgaagcgcgaaagaggagaaaatcgcaacctggaataaacttggaggcttggctgcagcctgaggaagattaagtctgatgcagaaagggttcaaccagaacaacctggccaactgcagaaagggttcaaccaatataactaagtttatttgtatttgcattatattatttgtaagtgtgatgtactatgttttatgttttcgtatttgtattgaattctttgcaagtttattgaattatttgcaagtttaatgtatttttttaagttcaactgagacaactgatatatgtatctgtattttaggattaacaaaatgataaaataattctcaatattttcagctattatcaacatctaaacattgaataaatccaaaatatgatattacaacattgttattaataaacttgatcataaactggtttcctaataaatcacctatgtatgacaaggaacatatagttcatgattgtccaatgtacatacgttatgtatgaaaacagatatttactaaatatgattctatcaaaacttattaaaatccattaatatgttaaaacttatgggaccaactaaaaaaatgagttggtttttcagattcaacttcaaaaacacaaaatttagaatagttcaactgtttgtgattccggccaactgtacatatacatacaactatgtgtattctgaatattctaataaataattttttttaaaaatagaccccacgaagtcgcgttcacactacgattattgcgttcacactacaaagtttctacctatttattctctctctctcttctatttcacttctctcgttcttctctcttcttcacttctctcctcagatcgtcctcaaagctcctcagctcgtcttcaagctcttcccatcacagtgaccatctcctcgcctagctgtcaacaaccaaggtattacatgcactggagttcttcctctctctcgttcttctctcttcttctaaagggtttctagccgccgtaattagtagatctagggtttcttacgggtttctagccgctgtaattagtagatctagggtttatagcgttcatgattcatatctctttctttctctgttctgtagatgccctatagttactctcaaccatccacgtccgaagctagttggaatagtggagaggcgaatgccgatgcaaattggggggttccagaaaaatgtttttgtggtaagcctgtaaaacttgaagtgtgcaaaactggttacaggcaaggcgacagagtctacaaatgcccaatgcttaaagtaagttattgtgttttcatttcattggaacaacaaagtacaagtgaattatatttatgaagtcttctctctttcgcaggatgaagagtacgagtcccgaaaccaccttattcagtggtgggatcaggcggtaactgaggagcttgagaaggtaaatcacaaacttgattccacactaagacatggacaactagcatgcaatcatgctttggagtccatccgggaaactattcaactcatgcaaggtgaaattgaaacccttaaagaaaggttactcgccaaagaagtcgagattgataggcttagggcattactttctacatggtgattatgatgtgttttatgttattgaggatggtgtatggcatttgaacctaaatatgttactcttgtattttaagttatgtgtattgaccggccaactgggacaacttagctactcttgtattttaagttatgtgtacgaaaatgttgatacacgaatcacagctagacgaggagtcggacgagctgactagctgacagctaggcgaggagatggtcgctgtgatgggaagagcttgaagacgagctgaggagctttgaggacgatctgaggagcttgaggacgagctaaggagcttgaggacgagctaaggagattgaagagctgacgagctactctctctgggtgtcccggccaactgggtcaacttagctactcttgtattttaagttatgtgtattgaccggccaactgggacaacttagctactcttgtattattgaccggccaaccgggacaacttagccaaacgttttgattttaataaaatcctaaaacacataaaccattacagaaaataagtttgtcctctacacataaactacgcataacattcccaaatacacaaaaagaaagtcctatttctcccaacacctaagagtccacacacacataagcaagaaagaaaagtcaaagtctcttcctcgtttgcttcccctcagctgtaaactcttcccccttatacttggaaggtttccttccacgttttttcccagattccagagtaggaccaacatgctttctcttcttcttcgatatctgcttcttcttcttcttcttcttatcctcttcatcggactcatcgctgccatcacctacaaaaatatgtaaccaaacatgtaagaactattgtgaaagcatcactacacaaaagttcaacaaaaactcacttagagactcaatagttggaggtgctgggtcacggattcaactgtgaataaccaaggccttgctctgagtatcccttggctgataagacggtagcacaaaatcagcagctgaaccaggacgcatatcttcatatttgtctttctctgcctctttctcaagctgatctgccacatattcctctattccttgtactctcacacaaatccgcttgatttcgctatccatcacagcaagcttgtccgtgagcttgtcaaatcctctctccatagcttccttgaacgagagaatcgatgtcccagggatttcaggttcaggtacagctggaacatcatcaacagtttcaatacgtgtaccatcaatgtctgcttggtagagactacgccagaaaatcttctttttctctacgataagcctctctctccaactatcaacaattggatcgatatatccaataccatcatcaacatgcttctctacaacgcgtgacaacatttttctctcatccatatcaggttccaagatgcttgaaatatcctgtcaagtaaacatatatttcaaacaccacaaagattataaacatagatttcaagagaacaaagctaaccgttatatctccaagtgcttcatttatttcttccaaagtaaatcccttcatgcaactttcactgaacttgtgcttgcacattcttggacattccttgtctgcacgtacagcttctctaaatctcttcccaagctgcggaatgcactcaaatgccagaatctagacacaaaaacataaaagtaaatgaaagttcacaataacaaaatctagccactcatataatttactcgactacttacctcaagtggagtaataaatccataaaaagcagtctgtgccttgggtttcaccacacctttcatgttcttcattactctccgcaccccttccatacactgctcaaaggaaaaacgtccccacgggaatgtctcacaagctctgacattatccacaatcctaagcaaaaactcctctatcttcgaatcccctttagaatcagctttcataaccttagctaagaataacagaattgccaacttcaacctagcagtagacttctcactcttaaactcttccagcttctcttccacgtctttaatcttgatgtcctcagtcctcttaaacaacctctccacaaacttcaaactgcctaaagtcttatagttttttgggtactcacggcagttcaaacaggtcaacaatgcatgctctctaattgagtaccctataggtactccattgacaacaaaccaacactctctctccaattctgtcttagccgtgcgaaccataagcatccacatgccttgaatcatgtgattgggctccttaggcatgtggaatatgtgcttaaattggtcatgattcctaaaccacttcagttctgcatccaaagtctctataaattccactgtttgtaccaactgacacctcgttcctatcttacacaccttcgtgtaggtagttggatcaaagtacataacttctggcggcaatggttgattatcatcatcatcatcatcatcatcctgcatattctgcggctgaagatcatcatcaccatcctgcatattctgcggcaggttatcatcatcaccatcatcctgcatattcaattcaaaatactttcaatttcacattaactacctagttgtactacttgttcctgaatgaccattcacaaatttacgacctagttgtactacttgttttatctgaagcaccattcacaaatccaatcatttaccaatgcatgcataatatcttaaaacgagcctaatcaaaataataacggtcttctatcataccttatttgctccatcatcatgttgaacaactgcattcgttgcctcttcttcttctgcacaagaatcggcatttgggtctgaaagatcgtcatttgattcccatgcgacggcgtttgaattacccaaatcggcggcgtcacaatcgccggttgtaggctgaatttctccggcttcctcttctgttgtaagaagctctgcgccttcttcatctctttggggaatctcggcggcggtctcgtcgactgatggaggaatttcgccggtcgattcaaccctagttgattcatattctccagatgagtcttttactctagccattggaaaataaatttgcggatatgaaagagacaaagacgaacgaaaacggagaagaaagaagaatagaagagattgatttttccggtgaaagtggtatcgtcggagacgagagaagacgacgacggagagaagaggaagaagtcgagaagtgaaaagggggaacttaggtttttacttaggttttttctgtaaataatacaactgggccgagtatttacatttttttttggacccgagcccaacaaattaagttttcttgtagtttttgtggtttcgcaagggtttttcatcctttcctcatttttcgatttaaataaaaatcaataataatattccaaacataagaatggcacgagtgattatttcttctccaatagtggcataagaggtgagctctcacttcacttccgtgtatacatttctcttttgtataaaaacctgtaaactagaaaaatggggtttgttttattagctaactacattttgataagatacaaaaatgttattggaataggcttatcgcgtaggctttagaaacttaaagacaaagtaatcaacttcactcgtgttaagattcacaatggccaaaacactttactttggtatgattgttagactcctcaagacaggctcatagatgttacaaaatcgaaaggtcttcaaaattttgggttctcaaaatgtcttagttgccgaaagagtttctttaggatgtggaggtttgtatacaaaagagcttaatttaatttaatttaatttatctcaaactgaatcctactttatgattgacaacataatttacttgaagcatcctacttagccatcctactactttaagggtgaaaacattaaaggggaaataagaacaaaaaatcacaactcttgttggatagtttaccaaacgagtcataatgtgtaaaacaatttaatggacccatcaacatcaggccatcaaccatatgttcactttattttcatgattctaatattttcttaagagtggttaagaatgacggaacaaaccagattaatatcccaaatttcttttcttttttcacttgcaaacatttttttagcatattttcgtttcatcaagccatcgaggtctgagttttcttcatgtttttttttatactcagtaaaatatgatattatataaaataaaaaattatcgtctctatttatatatatcgggcagaaaccaatcattgaaaattgatatgtatatattttgacaacaaggaggacgttgactctgaatagttgacttattattcattttgacttcagagaatataactataaatctcttaaaaatacacacttatatatagagtggaactatattttatctacgaaaaaatacaaagtcatgcacccccgatcttttttagaagaatcttctgacactaagcaatttactcatatttcaaacaaccaatactgaaatacttgatttacttctacactatatatagtctttttgatcgaaagctaaatagatataaatcgtttcacaaatatatacatacaagacattaatacaatgtattgttagtactaaagcaacatgaaaatatgcatgagataacaagattaataattgcaaactccattatggcattatgggtcacgctagaaatggatacaaatattaaattccttgtttttgtagaaaaatgtgtttgcaaaatcacttgtggatacaccaaatcggtggaagcgcgtgtgttacatgtgatcaaaaagtgaatttaaagtagagatacctttttcttttcttttgttttgctagttatgattggcattgactctcttgtccaaatgcctttgtaaacttcagctttttcctgtcttatttgtatgattccattttcaaccctttttattttttaaatcctaaattgccccaaccttttttgttttctactttataacccctaaatctccaacaattaattaacaaaaatgttaaagaaatgtttcgttcttttgaagaagctgattttttacggcacgatggaattaaaaaccggtatccaataagtactacttcatgtgcaacattaatttctttgagacattttgcaataaataagtaacaactttgtaataaatactagtagtatttcataactcaaatgcatctttaataagattcataaaagcatgtttgtctctctctgctggcaaatcatgatctaatctcacatgccaccaagtctaaagtcaccacaccaatctcacatttcttaaactccatacaaataaatcaatgtaagtatatattttttttttttatcttatttgaaacccagtattgattaaaggaacagtcattagtggtgacacttgaatttttaccgtaatttgtgtccccgacaccgtgcaaataagaagttgtaacactgttaccgagctcaacttacatagattatcacaaaagtatagtatttagttatattatgacaatcaaaatttaaattgggtcattcttaggatcacttctaaattcactagcgtccaattagttttaaatatacaatcgacaagcttttggccttttcctcaatctcaatgtaagaaagttttggatctttccactaatacagtgtttcttaagttaatcacttgctataatttaaaaccttactggaagtgtatttctgttctaaatattaaaactaaggtaaccgtttggtctcaaaatgcatttaaaatgtataagtaacttattaaacattataaatatataattctatttatttcgtaaattttaaaacatgaacttaatttctttatggtagatgaccaaccatgctaattgtagtggttaatggaattcgacttcaaatatgattctttagtttctatcttgtaaataaagtcatatattttacaaataatatacccaaataatttgagttcaattacctacttgtatattaagggttagatcaaattatttgtgtttggtttcgtctatgatgttataaaactagagaatgtatcattttcaagagctggtgaaaatcaagattaaaagagtagcaaaagctatctatctaattatattaacaatatcacaacactgtcactaataatataagggcttaaaatttaaaacctaattctttagagatgtcacttttggctatttgttaaatatttttatttcccctgggattctttgacaaacgatagtcttcttggtactggaagacaattctggtatccggctaaatataaagtgatataatagattaaaatataaagtgaaataaaagaagtagaaaagaaaagtaacttagccacattgtgaagtttgcgctttacagcattgagcatcctatgtctatttcctttatgtcttggagaaaacaatttttggaggtatttccattactaaagtttttttatatactataaatatttaatttatttttttgaaaaaagtatgtgggaatagattttctaaattttaacgagtttcattgttaaatagaaattgaatctaaaacaattataatgaaaacacttttgcactatgctaaaaattctaaatgttttaaaatatatttctatatttcaaaattttatgattgtatatcaatcatttacattgaatttttaccccaaaaaacttggttagcaagaataattcttagatattgtcatatactgtatttaggtcgttgatgagttttaaaaataacaacgtaattttagattatgaatggtgacatgaatttttttacggtgctaagaagcttgatcatacaatttgcacttgaccaattgcgaattttatttaatttgtggcatgatgtggaataatacaacgttgtttaagtgaaatgcagatatatcttttaagattttcatgttttgtgaactgctcaccaaccacccaaattatgggaagtgtggtttttttttatgctcgtttttatggtcaagaaaaataatacatttaatttttgcattaaaagttgcaaacgttacttagaatgaaacagttttttttaaaagattttcattcaactcttttttttttttttttttttttctgttagactgattatgtttgatacgtttactttgtattagtcacattccgttctgctccatctactgaaataacattaaccaatctgaatcttatattaaagaccttatagtacaatagttgacgacaatagaatatctaattgttacaaaacagtgagaaaatattgtcaaactaagtggatcggcgatgcatttgtcaattgttttgtttatacaaagataatgaaattgagacagggaacattaaaacgtcaaatcatttagaaaaagtagaattgtagttgtttggatagtagttttattgatgtactgataagtggtttagtaatcgatctcatcttaattagttggccaaatgcaccaacaactcgaatgagatgcaaactttataatccttattttataattttaagcaatccaaatatttgttttttctttatttattgccgtttcatttgactacttgattatagtcatatgttgaaataattaattatcaattagcattagtaaacaggaattacatcatctatttataagttgaaatataattagcatgtttttatatataaaaggaaacatatgtatgacaaaattcaaatagactatagttatatgataatgagactctagatcgaccacattggtgtaaagaaagtaaaactttaattttcttagaaaatataaattttgtatgatataaacctaagcagaatatgtatgtgtaagtaaatcaaacattaggatttaggaatgaggacaaaagttaagggaatgtaacaagaaaagaaacaaaaacaaaacaaaacgtaggatcctaataaccctatgagtgtagaagaaacagaacgagacaatgtgcaatgcgatggttcaacaactcccacttacattccaacaagcccatacaatacaatagttttttttttcactttacaagtaacttttaatttgataatttggaagtcgttcaaatattgacaaaagagtatatatataatatatatttttgtctccttttgttttcgtttttctcgtttcaccacaaaaatagtaacggaaggttgttttaccctctggcttgtctttgtagtttgtacatatcaattgttgactttttacttttcgatatcaattatcaaagactctttatctcttgggacggtcttttattacttgttacaatagaaaaatcgtaaataaaaaatgtgttatggcgataaaaatttgggtgtttaaacatataacacactctttttttttttgataaaacacataacacactactttaacatatatttttctttaaaccaaacatgtaattacactgcttttttactgtttatccaccatatacttatcaagaaaataactagtatacacattatttagcaattcgtgagaaaggttttttgttattttaatagtaataattttacgtatatcgataacccacgtaaattgttgtgctttttaatgcaaaagagaaagtccctaaaaaaacaaaaaggttaaagattgctaaaggctaagagaggtgatgatgtgagattcttctctctagggtcaaaaagtaatactcacactctttttgctcttctgtatttctctgtgtactggcgcgtgagatagaacagaaaataaagacatcaaatctttgctacatgtctttggtcgtatccgtatatatgttcttcttctaattattttagcagaaagaaaaaaaactaatcgctttcataaactcagatttgtttttttttttcaatggtagaagaagacaagtgttcttggagtttagtttcttcttatgattcattcataaatccgaggaaatatatcaaatctgtttctttctttctctaagtcaaaacccaactaagagattcttcttcttctttctttgagatcagttacaaagtgagctttgtttttaagttctaattgctaatttgctacacataagttctgtttagcttcttagagatgggatttgaagacaagaaaatgctgagacagagacataagcgttctaagaggtttgtcaagtttaagactttgttcttctttagctctgtttttagcttcaatgttacttgtttctcggtataatgatgagtgatttctcaaatttgaagacttgggtagttaaaatttacccagatgtaaattatttcgttggtagatgagtcaaagtttgagtctttgttgaagaatttgggttttaggactaaaagattgaaactgttgtgtactttctcatagaaatgtggttttgtttctgtctaattttgaacagaatctctgtttatctattatgtgtttcaactgtttttgaatgattctttgaatcttgttttagctgtactgttcctgagaagaaaaagcttgaagatgagaatagcattgattcttctctggatgcttctcaacgcctcaagctcgtgagtgtccttttgatttatgatatttcaaagctcatttagaacaactgattcttagtttctcttaacttgttttatcacaggacttacctcgttgcggcgataaatcttttgaaatgaagaaggatctatcccctgatgtaaaattcaagagctctctgaagcaagaggtttgtatattgaacttatgtgtagctagctctctgtctttagtccaagatcatttgcctcattcacatagttggttacattcagattcaagagcttgagaaaagattacagaaccagtttgatgtccgtggtgcgttagagaaggcattaggctataaaacaccatctcgagacatcaaaggcgactctactccaaaggtaaagaatcggtttcttatgtaaaaggacgacacaatgttgatgttgtgcagcttagtcatgaatggttttatattctctagcagcctccaacagaattgatcaaggaaatcgcggtgttggagttagaagtttctcatttggaacagtaccttctatctttgtatcgtaaagcgtttgatcaacaaacatcttctgtatcgccaccaacatcgaaacaacaaagctcgtgttcacctaaatctactcttagaggaaaacgtctagacttctcaagaacacctgaatctcggtgtttctcctttgacaacagactgaagagtccacgtttggtagagaaggagctagagtctcctaaccttagatgtagacaagaaagcttagccacgcaacctcgatgtttctcatttgacaatagactgaaggaacctagttctgctggtcgacaatgtaatcaagaagtctcaagaatcgattctcggagtttctcctttgacaatagagtgaaggaacccggttctgctgctcggcatttcaatcaagaagactcaagaatcgattctcagtgtgtctcctttgacaatagagtgaaggaacccgtttctggtgttcgacaattcgatcaagaaagctcaagaatcgattctcggtgtttctctttcgacaatagactgaaagatcaatgttttatcgagaaggaggacatcgattcatgtgttcgtcgttgccagtcctctcttaatcaacgttccaccttcaataaccgaatatctccaccagaagactcggtattcgcgtgccactcccaaccattgtccatacatgaagtaagtctcattgcaacggatctattttcttctatttacattgtctgtaactttactcacttttgatgcaacagtacatacaaaatggatcaaatgatgcaagccttgcagaacacatgggaactcggatatctgatcacatattcatgactccaaacaagttatcagaggaaatgatcaagtgtgcatcagctatatattccaagctcgctgatccaccatcgataaaccacggtttctcatccccgagttcgtctccatcatcaacaagcgagttttcaccacaagaccagtatgatatgtggagtccaagcttcagaaaaaactcgtctttcgatgaccagtttgaattcagcggaccttatagctcaatgatcgaagtgtcacacattcatcgaaaccgtaaaagacgcgaccttgacctgatgaatcgaaacttcaggtcagcctttaaatatcagctttccaaagtttcctttgttctttcaattcaattcttgtgctgatagtagtcattggtttatacttatacagcttacttcttaagcaactggaaagtgttgatccgagaaaactgactcatcaagagaaactggcgttctggattaacgtacataacgctcttgtgatgcatgtacgcggttttctctctggttctttgatctaacctttgtcttctttttactgtcatctcttaacttataattggttttcaccattgcagacatttctggcaaatgggattccacagaacaatgggaagcgatttttactactctccaaggtaatggtatcaacttttttcttggtttgcttcaaaaacattggttgaaaacattaacatttttgaatgataataaaacctttttttttttctctgcttaacatttttcagccagcttacaagataggaggtcgcatggtaagcttagaagcaatacaaagttatattcttcgtatcaagatgcctcgtcctggccaggtagggctgacttctaaagtatctcaaaaatacaaatggtctatgtgactatgtctaaagcttcctctgttttatttgtagtggctgaagttattactcatacctaaaaaattcagaaccggagatgaacatcaagaatattccctcgagcattccgagcctctcttatactttgcactttgttcaggcaaccattctgaccctgcggtaagtagagaacgcttacacttttgtcatcttctttgaagaatgagagatcttgaatgtgttttctttggctttagattcgtgtttttacgcccaagggaatataccaagagctagaaaccgcaaaggaagagtacatccgcgcaacgtttggagtaaagaaagaccagaaactagtcttaccaaagatcattgagtcttttagcaaagactcaggtttaggtcaagcagcattgatggagatgattcaagaatgtctcccggaaacaatgaaaaaaaccataaagaaacttaactcagggagatcccgaaagagcattgtcgaatggacgcctcataatttcgtgtttcggtatttgatagccagagaacttgttagatgaaattttcttatgtgattgtcttgggaagggtttttatttgcaaggactctgtttctttgtaatgtattattggtttagtgtataggtggatgtcttgtgtggtgagtgtagagtagaaatagaaatagaggaaaaattgcatgccgttttttggttaccaatccgcgatgatgtttgtacatacaaaatcgattctcttattttttaaaatttatttgttatagtaacgatatatattactaagcaaaatttcctagctgattttcttctccttaaactctcgcccgagtgatctctcatttcatttacttttgtttatgtcaataactcatacacaaattttaccgaatttaaaatgatatgataacacaacgacataaataatgtggtctactaaattccaagtttcagtcacccaactatgcctgggatttcggctaaacccgaggaaaccgaatgtttcggttctcggcgcagagagataaagagaaggcaaaccgttcggcaaaaataatattgtgattcggattacggttcggttcggttcggcaagctaaaccgatcggttttctcggtttagaggtacaccctataaaatagaagaaaccctagatctatgtcaacaattcatgtcgtctccttccttttctaatcttaaactcttctcctcaagatccttctttgatcttcttctccttcttcagtcttcttcgttttcgttctcagcttatcatattcgtttactgctgtgaaaccaacactctctggcatcaatccattttttttttttctcaccgccgcgacatcaaatctctcgtctagttgccggtggtggcaaacatagacatctgcactatgtaggaattacagatctagtcaagccgctaattattctctctttccctttgaaagtcggacgcgcatgagtgaacggcgtctccgtcaccgtcatcattcttcacttgtcaaaaacctagatttcagatgggcttgggcatgttgtttattttgggcttggacttttattagatttaccccattattaatttattattgttggtttataattgtaaatttaataattgagcccataatttttaattttggtctaattcggtttgaattaaccgatttagaaaaagggtcggtttagttcggaattgattttaatccctgtaaccgaaccgaaaaaaccgagtaccgaaccgacccgaaccgaaatttaattcggtccaattcggcagaatttttaaaatccgaaaaacccgaaaaaccgattaaaccaaccagattaaaccgactaaccgaactcccaggcctacacccaactattaggtagtaaaaatatccatcgatggtttcaagaataatatctaaaaaccaaaaaaccttgaaacaaaggactgaacagaggggtttggaacgagaaccgtatcccaactcaaggccctagaaagattgggcgacaattgaacgaatgactcatgaatgctgccaggttagacgagttagtgtcttttagtcacgcccaatacatttggggaacaattaacttcaccattcttatcaaagcctaaagaaaatagatgcattgtttgaaagatcaaagacatttatttttggtagggagaaagatcaaagacataaacaaacgtccaaaagcttttttttgtttgtgtgatataatacacacactttctattaaatttgttggacagctttatgaacatattcttttttttttccttttgtcaaacttttctttgtcttttttcttttctttcttttcatgttgtttggggtttactttctatttttcatatatatataagtatactttaaagtgctcatatataaaagagtgtttactcttttaagtttatcgcatatttatatgtctggttttagccttttctgatatagtctgataatatattcttagtagagatatatgattgtatatatggcttttaaaagtaggccatgatggtttggcaccgcacgtatcgtcgtctcattaaagtcatgtccaaacttattactccattctcttgtttccccattcattattgctttccagcatttgctagttgcatgcatatacctaggtggaccaaaaagcaaatgtaacaaaaaaaatacaaactcaaccgaatcgaagcgaattatttagattttatcatcttaccaaaaaaaattagtataaaccgataactaataatccaaaccgaaccaagtgaaattatttaggttaatatcgtaccaaatattttgtataaatcgattattataactaattaggaagcaaaataaccaaaccgcattgaaacaattttagtccaatagaaagttaaaatcaaaccaaatccaaactgtaaataaaaccaaatgaaatcaaaattacatcaaaccgactggttataaatgggttttaattggttttagttggttcagtttctatagaaccagtctaaccaagataataaacgaacttaaaaccaaaccggatcacccataaatagttagattcatacgccatagaaatctcacatcgaatcagaaatcaagtacgtgatgtggttcgatcaaatagtctatcaatcaatagctggaagcctgtaatcccaagaaattgacttcttcataatgcaatcagatgggaccaaatcgggtgatgcgtctcaaacctaacccctagcgtgtgtagggtctctcaaagtcaaattacttagtctatgtgatgtttggttgattcattcatatttgtgtcactatatccattactaatcaaaatccaataaaaacgtttgcatatatctaatttttatattaaccttctaattcttggcaaaaatttgtatataaagtttttggaattgtgttttcacaaaatttcaaccagggactaaaatcttgaccatgcgaaagtgccaacttctaaattgtttactataaaaatgttcaacaacaaaaaaaaacgaatactttatacaagtcacattattagtctggcgtttactccatgatttattatgttatagttataaagttgttgttattttttgtttggccaatcaaaatactagtgataacttataacaatgagacacatggtcctttcttatccataaactaaagtgtagtgtaattggttaaaccatgtctatcttaaccataatgatatggggcttaattggtactgtggaaattgacatcaaaacaactaatatttcagacagaataaataaggttaaaaaagaggatatatagattagactgtttgagtggtacagaacaaacaaaataaatattgaacgagtctatataggataatactgtaatatactaattctcaaattttaacatatgaataaataaattttgtataactatttgatgcaataaaattaatccacatgattttaaatgcagctgataataataacttaaatccataatatgagatttttggatacactacactttttaattaaaaaaaatacactacactttttggattattggtgtgcgattttaaatgcagctaataataattttgcaccgcattagaaccacattgtattaaaatcacaccacatataaactatatatcttttgaatgattggtaagaaaatgcaaccgtaaaattgtaacttaaatccataatatgagatttttggtctttctcaactcatatgattagtaaaccaagtacaataagttttcccacgttgcaaaacgcaatttgcattaggcacaacaatacttctccgataataactacatatttacaaacttaaccctacaataataactaaatcaccaaactacccttcattcttctatcttactcaacttcgccgcatacttcctcctcccgctaccaccaccaccgcgtcttttcccattccttgtctctccattagctcccaccgccgccactcttcgagcagaaaagatcaccggagacacacatttccgacgacaccgacatttatctcggccacatgaaccaccacttctcataagagcagagctagctttaacagccaatgcagccatttcctcggctttaagagaatgatgaagcgaacttaaaggaagagcgaagtacagttgaccaagctgaaactcctcgtcggcgctaatggcggatacaacgttgtcaaagtccatatcatcggagttacatatgaaacacatcggattcttttgtaacacgtaaccaactttgaccggacttgtgaactccatcatccttccgtcgtgtaagatcagcttcgccgttgcgacttgtgtcgactcgtacgagctgcatatacccattggtttggtttgactcaatgagtcgactcggtttccggccaaaagggaatagtagaaaggagatgagaagtgagatgtgtttttgtgtgtttatatatataaaaagaatatgccacattggatttgttttgtctttttgtgattatgtgtttttaatatttattttgaagtttgaacgacaagtggggacaatgacaggctgtttaagtaagttgggaggatgacagcttctgtgttgtgatttgtttgccatttgttttggtgtataattacgagtttagggactgtggtttgggaattgaattcgtttgctcaattttgactaatgacggctcttcttttgggttaatagacagtttattaaggatatagataaatggaccagtcgatatgagaatgtaagtatgtatgtcgcagtcgataaaaagtttgaaaaatagtaagatatttaggctgaagcgttaaactaggaaatgtatcttgcttagggaaatgtatgtagttcgaccagtaaattcgtagtttatcaaaaaggattatactgtttaaatgttattccggttgattttttgaagttttttttcttttaaatctcaattctatatatctagatttttctcagctatttatgtgtttaaaccctaaaagttaatttttaaaaagtttttaatagagaactagtgcaaattgactataaactaacaagttctccaatgtttttttaatagaggagtgcaaattgactaataaactaacaatttttatcaacgtatggtagttggaagtgttagataaggtttgttgaaaattgaaaatattgaatagtaaattatattaccgttcaacttttggtcgagtagatttgttacttctgtattctattctattcacatcaaccacaaatgttatgttcgtgatgcatttaattttggctaaagcgtagtatatgtctgatggtgatcgatgtggggatgtgtataagttgcatgatctgaaatttattatctgataataacgtataataattacaatattaataaatcataaaaaggaaggaccatgcatttcatatatggttctcatttattagtattactttcattttcgtacatgaagagatgattagctttggcatacactaagccctatgattttgatggccaagaagctacgagatttaaccattgaatgttatttaatttcattgtcgagcatgattatggtttttgtggatagtctttacgggtatttttttttatattttactttaatactagttattaattctttaaaaagcagaggaatatctttaaatttttattttcacgaataatctatatatacatttttgcagccattttaacaaataaatctttgagtttgacttatttacaacccaatgccattagcattaaatctttttttcaaaataattaattttactttaaattcttaatttaaattgtcaatcacattatcaatcaaatttaatccaaacaaacttcacatcaatcccttaaaattagcataaaagtattttgttaacaatattttaaaacaaagttttttgtttaaataaatattgttcttactaaactttttttttttaaataaacaaatcatttatttgaacttatttacaatgtcatggtactgacattaattatttaggtatgaaaatatttaattaaagatttaaatcttctaaattcttgcttttagagttattatatcattacctaaaaggcaaaaaatattaattttttaattattattatttatatatttaaaattcataaaacattaataatatttaaatttataaaaagtttaatatatcaaaaaaacttaacatcattatagaatatatagagtttaaaaaatctaaaaacaaaattcttcatattttgtgattcgaaattttaagaatgaacatatattaactaattggcgaaaaatgtgtgggttcaacatcccgcaacgaataaaatcttttgacaatgattcataaacatattataaataagatcaacattaataaaataaatatttttttttgtgaacgggtttggcgggacgggtttggcaggacgttacttagtaacaattgtaaactataaaataatttacaaattatatatatattaattttaaaaaatgaattgtctccgcggtataccgcgggttaaaatctattagaacataagtgtgataccaaaattaactgaatacagacaattttctacgttaatatttatatttatcaaatttttatttattttttccaagaaaagaaatttcatgtgatactgcaccaatggggtgatactgcaccaatggggctatttagtgaaactcgtttttttttttttttttttttttttttttttttttaacttataaagaaaaaacagatttgataattattagttaatgtgtaagattttatgaaagaaagtaagtgtaatttcattgttatacatagttttctgattacattgttatacctaaacatttgtaatgtattagttgtcctatcgataaaaccaaaactatgtaatcttttttttttttgtgtgtggacaattatagtaaattgacttataagcaatgtttacatatgtaatccataatttaaattaacaaagtaataaagtaagacgttagaaaaaacctctttaagaaaataagttgaaaataaacttttttttttttttttttttgggcaaactagaattggttgatcttcacggggacggtggcaaaaaaaaatcagagtgattgggatatatgacatggctaaatctgccacgttataataatacgaacgcaatgacgtgtctacgttaataagcgtgtcctacctgaaatcgacaagttgttggagaagaggcaagtataaaagagttagagataaatatatcatgtacttatttttgaccaaaatatatcatgtacttatttttgaagtgtatagttattaagaactgacggctgtttagctgttatggagtttaaatgatgaagatgatatgatgggtcaatggttttaattgtcaactaagcacattgatgccaaccacaagtgacttgtgttccctattaaatttctatttattgtatttaaacagttcatgaatacaactactaaacttcaacccacactaaggtaatactgtttggtcattactgtgaatattgtgtattgcatatcttttcaaaagaggttacacatatatatacatcgagtactagaaggttctaggttaaggtgattatagaaagactaatgaacaaggaaataagatattgaggtaatgaaaacatgatacgattgtatccttgacaattacgtactgaaggaatggtggattactagttagaaaattgattaatacttgattatgcttctgagttttctcgtgcattggaaggagaaacagataggcatggtgatgacttggcggttgtaggcttgtagttttggaatatctaattaataatacgcttgttggctataatgcacttgtaatgtgtgttttttattcttacagaataatttggtctctgtatatatagtacttgtgtcgtggcatatgcgtgcgtagtttataaggaactatttattgatttagttgtgaaattgattttaaattatgcgtagttctcttttgcattaagttaatcaggaacttctcttttaacttgtaaagttttgcgtgaaatagaagaaagagaacgtcacagcactgcgtacgcttttgtaagcttcatggatgatacattaatctctcatagtcttacccccaaaaggtatgaataacttttctgataaagtttaaagttataaatattgaaatggtcgtcgttacgttttagactaattagctgattttttttcttctaattttctgagtagtataattcttcacttttatccgattgtttttatataaatgataagaaacagattgaaacttaatttccaacgcaaatttctggttacatcacgtgtgtgcaaggaataagatccggaatattggtcaaagctcttacttaactttggaaagctaaagggtagtaattattattatgattttttttgctgtatatatatggaacaagcaaagttgtctaaagcaattagtaggaagagaccaacaggcaaatcatggactgcagagaaaaagattaaattggtatttggtctaaatttgtttttttcttatataatgtgggattatgagtaaaaccttcaaaattaatttttagatatttttttattcaaaatttagtctcctaagtacaaaatccatttttagcaaatgaacttccatggtaataaagaaagattacttttgtaagcatagtagttgtattatatgagtgtttataggatcaattagtgggaattaattccagactttgattaattagccacaaacattaaacaaaaactatttttcttaaaattttgaataaatgagatatttatttaaatattccatattgtatgatctttaatatttatcattttgtatttcttttttttttttttttttgtatttctcaaggagtgggatacccttttttactttgtcggattcaattgttgttttgttgccaagattcaatggcaaaagcttgtacttgacattgccatgaaacttcccattatagctttaggatcagcatttttcaatcatcaatgatgtaaggttgtcttggcccatagatctctttttccataatcattcaagatcttcctaattattggttatgtaagaaaatgataaattattagttcaggttataaagagttcataatttacttttaatacttgaaaattgaaatgagaaaattgtgtttaagaaaactaagatcgatatgtattacatatatataggtttaagatacctgtcttaattctcatatatatgaactgatatcgaaaaaatgggttgtcaaagttacttcggtatacttcttttttttactcctactagaaaaacattattctgaacttgggagttgctttctgtatcaaaactcggcataagaactcggttccatctatctttcgccagcttataagaccactgatcacaatatcagcaagatcgttgcgttcttataagtagaagagggcagcaaatgaggacaaaatagggtagacaaacagaatccacaaacaaatgctgtaagtgactttgtccttttgagtgaatgagtttttgataccaccacaagctttagtgtgtttattgataaggtaaaagctcgtgagaaggcacacatcacctcccgtatatctcaggtcgtctctgaatattgcccctatgtcactcggtgtaaccacaataagaagaattgtagcacccgggatctctagcgattctgcaatttgttattaacttttagttaagcaatacacaaaaagatttgaaccaaaccgtaaatcgggttatccacccatacgatacttaatagaatgattatttatatcttatataatataaactttgaagattatttatgttctagatgttataagattacataccatgaaaatggtttggtaaaaaaagcctgagaataacggtgaggagagcgatccatttcccaaccccgttcctgcgaattcaaaatcgaaatatttaatctgatcattgttacatgcacaagaacaacaacatcaaaaaaagtactttgcgtgtattgattgttacctcaagacctgaaaaataacaataggaaggctagagaagaggtaaggagctaatagtgaagccattatattgtttgagtacttccatttcgtttgatccaatatcataagaaaactttacacacaaataaaagaagtaaaccaacattaaaaaattaaaaattaaacataaatccaaatgtttaaaatatgaaagacatgactgacactgcaacgatggacgcgagccatcttaggaacaacgtgatcataactgggactccatagctgtggattagcttccccgcaacggcttggatctcattcagatactcaatattttccatttttcaatatgaactaaaagaagccaaaatacaaaaaaaacagaagcagagcagaagaactcaagttataaaaaggaacaagaagacccaaaaccgaagtcttcgtatttatggttactttttttttttttttgataaccaaaaagggattcaacacgaggaactttctttatatctagatttgacattttgtatatgattttgtcattgtcatggactgctaaaattatttttaagccatccatagttgaaaaagtcttgagaagatattccaaaactacattgcaaaatgctaaaccaaacctgaagttaaaccgaaatgcccacccctaaaaattaacaatgattttttttttttcgttttttcttcaaatgtaaacgcaaacaaaatcatcaaaaccgaaaaattaaacaataatacatctttataattccttaaacggaaagtttccaatatttgatgcaaaactgagttacgaccaaccataaagaagccacaagctttagtgtgactactgagaaagtacatgctcgtgaaaaggcacacacttcctttatctcttagtttgtctctgactatttccactaagaaatttggtgtaaccacagtaagaagaatcgttgcactcggaagctctagcgagtctgcaaaaagacaccaattgatttggggtgtgcaaaacattaataattaaatgtaagtaaaaaaaagaaaacaaatcaaagtagttaaaaccaaattgaaccaaagtttgtttataaaaccacttaatttcatataaaaaaacacaaacaaacaaatcaaacaatttttgaaaaaaaatattatttcaaaaatatacgtattaaaatttaaaaggggatataatcaaattaaatgattgtaatcttaaaatagttttaattcttttttatcaatatctgaaccgatagcaaacatatatacaagttacagttggttgtttatgatttcagttttaaccccaaagaaaccaaaaactaaaacatttaaagttttaaactgtaaaagtgtgggcacaaggcaaagtagccgctattttagggatctttgttacttgacttgctctgtacccctaatttcaagtgcttgctaaaaaatgattacatacgagttacttgtcttgttgtattacttgcgagttacttgctgagtacttgttgatgatttgtcatgtttttaacctgcttaaaatttactttatttttttaatctaaattttaaatatgtttttaaaaactaatacaatacgaaatgtatgtatataaaatgataaagagaaaacgagtaacgggtacttattttctcaaggtggtacgaagcaagtaacgtgtactagacgagtaacgagtaacgagtaatcgtgcgaagcctctaaaccggattgcctacctttactagtttaaatagaataaatattcatatcgcaaactgttctctaacattactatatatcaacactgaagactattaatatcgtaactaatattgtttcaaatctcattggtactattctaaggttgttaaccagaaaaacggtttgggaggaaaagcctgagaatgactgaggagagcgatccatgtcccaaacccggtcctgaaaatacaaatcaaatacttaatccgatcattgttacatactcaagaacaacaacaaaaggtattttttgtgtgtatgaattgttacctcaagaattggaaaacaactaaaggaaggctacagaagaggtaaggagctaatagcgaagttaacatattgtttgagtacttccatttcgtttgatccagtatcatcaaaagactcccaaaacaaaatataagcaataaatatattaaaaaataagaagaagacttatacataagatcaaaatattttaaatctgaaacatatgactgacaatgcagcgaaggatgcgatccatcttaggaacaacgtgaccataactaggactccgtagctgtggattagcttctctacagctacttggagctcatttagaaaactcaatcttttccatttttataataaatttaaagaaacacagaagcaaagcagaactcaagttatataaaagcagagacagaacaagaagacccaaaaccgaagtctaatttgtgtacatggattttttttatttttttttcattcagaaaaaatctattttgctgagttttggggctgaaagtggattgaaaataaataaaataaattggatttaacgtacaaaatgttttattattctttaattataatcttttttatacccatttatcaaagaatctcaatggagatgacgtgtcacgtcaattgacaatgaaattattttgttatcttatatattatcaaaacttttcgtattttctatttcacatctgagagcttttttcgtttcttgtgagatcatctaaaaaatggcttcgactgtttcgctttctttactcagcggcggcagtggagctcttcaggcgcgttgcgcaagaaccgcgcatgttagcccacgagcggcgcattctaacaaacccgcgctttcttcgttctcgctgaccggcgcctctcgcaggaatctgttattttcgttgacggcagcgacggtagtgacgggacttcagcctgcatcaatggcggagaatattccgttatttggtataagaaagaaactgaagaaagcagaagaagaagcggtggagatcgtgaaagaaggctttgagacggcggagaaaggcgttgatgcggcggagaaaggattagaagcggcggagagaggtgtagagacggcagagaaggaaatcgtgacggcggttagctttaatggattgacacaagctggagccgtcgtggcggctgagttcgtcggagttcttgtcgctacgtcagtagtgaatgggattttaggaccagaagcccagaaatcttaggaataacctaatgctatgtgtacttttgtgttggagttaaagaaatatttgtctaaatttttgctgttaattatgttttgtaatatcataaaccatatacctagagatgaagaagatcagaattatgtggtctattttgcttcggttttgatttttatcggaaataagtaaattgtgtggctcttatagcttatggcttatagcattttcaaagcacatttcatttttaagtttaccaagcctcaagtttaaagttgaataatattattaacatcaaaacaatttttattttgcatttaaagtcttgatcataatgtcttaaaatcacaaaacttatataaaactataaaacatatattataatatataattataatcataagttacaagtatcaatgtattaaaaaaataaatagtatcaatactaaataagattttttttagttttcttaaagatatttatcaaccattcaagttaaattcaagacataatattcttgtgttattatcaactaaatcttgactcttaatattgtatcaagttttgtaaatcaataaagtatttagagaatttaaagtaaatgttcttgattttatttcatcaagtttaaatcaatgaaaagtagttaggaacgttgatttatcttctttactctttcaattttatacttttataatgctattattggaggcaaaaaatagagaggaagaataagctattctctagtatctatatgaactcttcatgtaaattactaaagaatattagttacaagaatgaaatatctataacccgttcaagttaaattttctatgtttcagttgtcaaacttctgcattatcaggttgtaccttcactgaatacattatattgtagaagtttaaatcaatgaaatatttacagactctaatattttttatattaaaactctaatacacttttgttatcattaattaatgttttactaattacattgtatcatattgaatcaatgatgtattagagacagtaaaaatactattcgtaactagtaatgaattatacttttcaaatgatccttttatataaatttcacaaattttaaatgctaatttctcattctttatttgaagagttcttgtaaaaaatgctaaagaatggggtatattatttttttagattctaaatttgaaagttaaaaattcaagacctagtaaatcagttaaaaatataaaagaaatatctaaaaataactcactttttctccattgtaaacaaatttgattttcttttcctatgaaatttgaattagtcttctactaattatgcagcttaaaatatcattgctaacttatcaaatgatacttcaaattttttatcagtcacaaaaaaaaaaacaatttgcataagcggtttagatttaaatttgaccacacgtgtgtaactttgtaacacgatgtctctatctttctctctttcttgttgatgtgttttaaggttttctaaatctcatttttgtctccttaaaattttctcagaaacatttccgtcatttgttccttagttttgtaatcaatcttcacgattcctcaggcactgtacttggcaaatctctgtctttttttctccttcattttctctcactctctcccaaaaatccagtaattctatattattttaggtgatcattctgatttcaatttttttggttgaatttttctaaatagtaatgttatttcaggtaccatcctccaaggtcataagagaacaggatcggtgttctcgaacgagcgggtgcgatttcttgattctttaattttatttgatcacatttcttaattctctcatatatatagattgattgatttggttgaaaattgatttaatttcataactatgttttctttttcataattaaattttcatagttctgtttcttttttgttgttgagaaagttgatctaatgtggttgattcaaagggtgatgtaaatgttcttgcctggtttttggtttcttgtgttgaaagctaaaacgtatatgattttgtgtttcttgtgcttcaagatatttcttacatgttatttcccttgttctctttgtcttaattccattcttaaatttttgatagtgttgtgtcttaagtggggatggcttcaacaccttgtgcagcatgtaagctcttgaggcgtaaatgcactcaagaatgtgtgtttgcgccgtattttccaccaactaatcctcaaaagtttatctttgttcaccgagtttttggagcaagcaatgtaaccaagatcctcaacgatcttccacctgatcaacgcgaagacactgttaattccctcttttatgaagcggaagcgcgtatccgtgacccaatctatggatgtgttggtctcatttcttttttacaacaatacctcaagaaaattcaacaagatcttctcactgctaaagaagagcttgttggttacttgggacccgatgctgtgattccgccgccttatcttcctcctataggtaacaatcctcctcccaatttcatgatgtctatggaaggaatgccaccaggagtgatccctcaaggagaacctttgatgatacgcgaaccaaacatgtctcagcaacatcatcatcaacaaccgcaagatgagcagttgcaattcatagcttctgatgcacagagaatggctgcaatgatgttggagagaggagatcaacaagggatgttcaatggttacggaatagacaacaatggttcggttacagccacgggttttaaccaaatggatgtgaatgatcaaggtgctggtggttcgttgtctggaccatctcttgctttaggaagctttggtgatgcttatcagatgggtcaagagacagagcatggtcatatcaaccatgatcagcttcagacacagcttatgcttcagcctccattacaagaaggtcaagaacaaacagaggaaggacagttcttgatgcaaccaatgggacaagagaatcttcatgacgaagaggaggaggaagagcttgagccaccggttaaatggaggatgtctgagaacaaggaagctagtttttaagacctaaatgcatttaggagaacaaaaaaaaattcctattttcttggatagtttacttaactcttgaggatctatttggtttttttttttaataatcaaatggtattattcattctcgctatttgcatctacaaattaagcaatctgaattcgcatcaattgtctataatgccacagaatcgactcggatttttgctatggttgagaagttttcgagctattttcagagaatggattgtgtattatttttgaagccaaccaaagcaagcaaatgatatgatcatacaacctcagcatgaaacctaatgtactctgattgggatagactttacttgtagtcatgagggacatgccgtaatgaaccacttgttaattatttttcttttttcaaaaatattttcaacaatggtaagattaaaagagtttatgaaggaattaccgattgagcagagcagagatattatccatgcattctgtttttatcattttgcgattttgtcgttacacactaatcaaaattttcaattctgccacgcaacttataattgtgtctcttgaaaacgttaaatacagtattggagaaaggagaaaaacgtttaatcatcgtatcggaaacaaattagttttgaagttaagaataaaagcgtacagtaaaatacgggctatttaacgtttacctaaagtaaatgtatacatatcatatttgtagcttagttaacatcaaatcagagtggcgcagcggaagcgtggtgggcccataacccacaggtcccaggatcgaaacctggctctgataaaatgtttcgtgtttttttgttttgtttttttatcagtttaagggccgagctcggcccaacaacaaaatatactgggtcttcaattatgagacggaccctaatatcttcgcctgcccaacaacagaattacatacttgtaaatcaccttaaactttttttttggtagagagtagtaaatcaccttacacttataacgatatggcttttatgcaattttccctttctcatcttgttttggtttctgttatttattattggttttttttttttttttttttttttttttttttttttgtttgtttggaaactgtaaaagacacaggtaaagtcgaccaaatttggttacaatttacatatatgtaacttgtaacacatatattttacagtaaaagacaagtaaaatctactctgattttttcactttctcttctgtaccatggtgtaacttattcttcatttccaaaatcttctcatgagttgtattatacgctcccttcgatttatctttaaggctacccaaatgcttctgtatttgatctccgtactcttcccacaactttggaaccgtcaaccccatcaccaaacctgtatcagagaatcaagaaacatgaatcacatctacttgaaaccatcttaaaaacacatagtctaatgtattttaatgtagttcttttttcatgttaaaatatattgtacagtaaagactataatcttctgatgaaaatatgaatttatagcattaaaagcattctgactttattgcaattcatgtggatgttcaggaaaatgtattgcaattttgcccagcaggtgaatcaaacttggaacgtgttgccactagaccacaaagcgcatgaccatattaagaacattaccacgaccattaacaattaatggtaaacagatgattaataattaaattaatctaatgaactaataatggattaatcagtaactactaaattagttacttaccgatgaagagacaagtaatggattaatcagtaactacaaaattagttacttaccgatgaagagacaagtatggaaatcgagaaggttcccaattcttgacaagatccaaaaacctaaaacggttctcgcgaaaacaaaccattcactctcagcaccgactcgaaacatccatctaaccatttcttccattagcatccgacaagacctcactgtctccactacaaactcctccgatacttctaatcctgatagttccggttcgaccctgtccgaaaattaatcatcttaatttataagaccatctttaataaagtgttccgttcaaacatggactatatttataacatgaacaactagctagtgcatatgaaaccaaacatatacgaatcagaaattatatttaatatcagaatttctttgagtatgtgtattaaatttatgggggttttaaggtgtttttaatgatcttttgacacaacaaatttattttaaaatacttattttcttgcatgagatcttcaaatagtttgaaatggaaaataattaattacttgctgagaaggcgaagtaaactcccccagaggaaaatcatagagacgactgcgatgccgatccaagatacaatggttatggtagtgaaaccataaaagctaagtaaaatccatgtcgatgttgagaccaggagtgtagagaaggccagtttcttcctcctccataagtaaatatcctccacaatgtcttcaatgtaatttatgaaaataacaaggacaagatcaaattaaattaagtataaaatctgatttaattatttctttaattagtcgataaagaattttatattttttggcatcatgtttcttaaactattttttcttaccagatttgggtgttggatctttggtcacgtcgttggccatggctgttttttgataatagctgaacgatggatattaaaaataagaaaattatggatgatgatatatatttattggaatttgataacttagaccagattctgagagaaatatttctcattagctcatagtgtaacacgtcgtggtaaggttgtggtgacgtggaagtcatgcatgattgatatgtgttgcttgataatcaaactatgttctgatgttcaacatatgaagcctcttgtagctaggactattcgatgacgagtaaattcgaggagctttagttcgttcgcttggatagtaaatctgatgacttggataattatagaaaaagtaggactaattaactcgttttgacccattacaaaatgtgtgaatttaatcaacttaacgcaatttccagatgattttttcgttttctctaatctcttgaacgagtttataaatattatttagaagtctgtcctagtttcttctcgttctcttttagtttttgcgctttaaagtttatattagaactgactatttcactcattcagtttacagtagaagtaaaagaatttttttgtgtaaattttattatcttcttgactaggtaaccagtcaaagacttatctagtttaaatgtttggttgcaaataaaataatttaaatgatttacttttttttgtcggtaatttaaatgatttacttttttttgtcggtaatttaaatgatttacaattttaccatttggcattttcaaatatttttttttaccaaagtagtctaattagtattaaaataatgtatcttttaaataaactaaaaatgttttaaatacaataaaagtttgccaaaaataaaagaaattttgtcataggacctagaaaaagggatcgaaggtgaataaataagattgaaatggaataaacctctaaattagcatcggagacggtgagaattagagtttgacggttctaggaggcttcatcggatcgagttcatgtttctattgttttcttataatacattaataactaattgatctgaagaagagcaacatgaaaaacccgagagtattggtgacgcattcatgtgtgattaattaaacaataaatttggatcctcaatgtgattccttttagggatgcctcgccatatccacaagttaccttcagtttagttctttagaattaatgctgatttgtgtattgtgacagttatatattcatgaatttgagtaaacaaaaattataattgagccaaaaaacttgttttgatgtcaatttgttttgccaagcaagtccaaattaggggcaatttcgcattttacaatgatacataattttttcatatttgaattaggatgaatatctatgattcttcgagttgcttttttgttttgttttcccttttttacatttatgaaaacttgtaatctgatgaacaaaaaaaatgaaaacttgtaatcaaagtcaaatttcatgacccaatggtgcattaaatgagaagcggttagtggcggtgactataacttttcttttactgaccaacgccattccaaaactatattttatacaatttaaaatataacactcttaaagcaattcccccttctttttttttgtcgaccaaattccctaaatatattgacactattcgattagtgtttaggttcaataatttatttcaaaatcgatgtgtttatagaattagcactcctaaatcatttctacaaattaatttcttctgcatgataattgatatatagttcactgaaattattcgattagagtttttcgtttcaacaatttatttgaaaatagatctacaataattcatacacttaattagtactaccaggaaaggtaattatcttgtcgagtaatgaaattctaactcatataattttttaaaataatatttactgaaacaagatttacatataaaaaaaaatcagtgacgtgaatatgatatgaacaccataataattcatagatttcgatcatattttcccaactcataaaaatctattaggtatatctaaagaaaaagaaaatactgtttgcggcaaatgcatgaagtacggcgcaaaagagcattggtgcctttctgtacatatgcatgcatggggatttacaatatgaacctacttcctcacttcccgtaattacttctctattccatactcacttcgtcacttgtattaaagcttaaccttggtgcaatctcaattacacttttaaactctatgttgatctcaacaatgaagcagaaacatctactgcttctaggattcttattagcttattgcttcagctctgtttttgtgataaacgcagaggacccctaccttttcttcacttggactgttacttatggaaccagatcgcctttaggtgttcctcaacaggttatacattgttctgtctatttttcctatgcattttcttaatttttagtattttttttctttataaaccgtggcagttccgggtgttttttccaattttcaaaagcagactttaggtatttcgatttttaaaaataacattttgtaccaaagagagactagacccgatatataacggaaaccaacactcttataccacttctacattaccatctctttaatcttatttagttctgtttcaatcactattaattaatataatcaaaattttgatcttatattgtttttcaggttattcttattaatggccagttccctggtcctccaattgaaggtgtaacaaacaataatatcgttgttaatgtcattaacaagcttgacgaacctttcctcatcacctggtacgtaaaatgttttagcatatgcaactagatcactcgttcaaattttatcccacaaaaaaactagatcattcgaataagctaccgatatttttcatatttttattttaatatacatataaattagttagtatttagacaaaaaaaaactatggaatcacaaaaccatttaccaatcagagaactagaacttgacactttcgaaaatgcgtaggaacggaattaaacagaggaagatgtcgtggcaagacggtgttttgggaacaaactgtccgatccaaccaaaatcgagttggacttaccattttcaacttaaggaccaaatcggtacttatgcatactttgcttcaacgtcgatgcatagagcaagtggtgcttttggtgcacttaacgttaaccagaggtcagtcatcttcgttccttaccctaaaccagacgctgacttcactctcctcgtcagtgattggtacaagatgggacataaggtacaaagaatccttaatacacgagttaacttatttcccaagtaaccaaattacttttagggttgaactaagcgatctgaatatttcagcctcttgttattgtttttgacaggaactgcaaaggaggctcgactcaagtcgtgctcttcctcctccggatggtcttctcatcaacggtgcttctaaaggtttagtctttaccggtcaacatggtatatcctcatcaccaagatccactttcctccttaattcaactctcagactctcagctatttgatatcttaattgatgatatgtttttggtgtttgtaaaggcaagatatataggtttcggatatcgaatgttgggatatcgacatcgattaactttaggatacaaggacacatgatgactctcgtcgaagtagaaggttctcacactctgcaagaggtctatgaatcgcttgacatacacgttggccagtctgtgaccgtgttggtcacattgaaggctccagtgaaggactacttcatcgtggcttcaactcggtttaccaaacctatactaaccaccacaggaatcctcagctaccaaggttccaaaatcagaccatcacatccccttcccattggtcctacttaccatatccattggtccatgaaacaagcaagaaccatcaggtaatttatcctatctgatcgcacaatattaaaccgaacaatttcgtgcaacacctcatttgaaaggtgatatttaggctaaatttgacggcgaatgcagcaaggccaaatccacaaggatcctttcactacggtactataccgataaatcgaacttttgttttagccaacggaagagccatgatcaatgggaaacttcggtacacagtgaaccgtgtgtcctacgttaacccagcaactccattgaaattagccgactggttcaacattcccggggtgttcaatttcaaaaccattatgaacattcccacaccaggaccctccattctcggaacttcggtctttgatgtggctctccatgagtacgtcgaattcgtgttccagaacaacgagggatctatacaatcttggcaccttgacggcactagtgcatatgttgttgggtaataactaagcctaattcttttcccattatccctccatattgctctcgatcaatcaaatttgtttgttagagtaattgatgaagttttgacatataatcagatacgggtcgggcacatggaacatggctaagaggagaggttataatttggttgatgctgtttcaaggcacacttttcaggtaaatcctaaaaacaacactggtagttttttatttcacaagaaagaaaaatttgtctagttggtcaatttaaagcccaaaacgttcccacccaatataatacctgatttgattttgcgggccgatctgaaacctaaaatatagtaatcatgcatatataactacatctatggttctaaatgttctctatatgtgtgtaaaaataggtttatccaatgtcgtggacgagcatattggtatcattagacaataagggaatgtggaatttgaggtcacaaatatggtcaaggagatacttaggacaagaactctatgttcgtgtatggaacaacgagaagtctctttacactgaatccgagcctcctgttaatgttctcttttgcggcaaggccaaacatccccgcttgatttagatatatttttatcaataaattcccttatcgtgatatggttattatatttataggttattacagtattaattaagtcacgagggtgtgacgttaacgttgaacaaaaagacacttctataagttttgagtgatgtgtttcaaatcacgagcataacgatttgtaaaccaattaatcaacaagaaacaataactagttttgtctatattttttccgagacaagattgatgacatatttcttaacaagaattagcactacctgggctccattatacaatgtatacgtccttattggtgtcgagaaaaaaaaagtcacgttttggataaaagtcactaatttttcaacaccatgggatataaattacttgacgttttggaaatctccgctatttttatttatattaaatggcaaaactgtcaatatttcgttgacaccttagacacaaaactctatggatcgttttaggcttttagcaatcaagttatacgttaatactagactaaaacccggatgataagtatcttctaaattgaacacaaacatataatttgatgcgttggaatttttatttaaaatttacgatagtttgtcgtaaaaatgttgatataatttgatccttcaattgaaaatgataaatcagcggttatataatattttaaaagaaaagaacgatgatactaatgaatgagagattaaagaaaacatatcaaaacaaaacaaaccacaaaagtaaatgaatagaaccatgaaacagactggccattaaatcataccctactaatgttgatataaaccacatgttgtatttgtatggtggagtcaaatccacctactaaagagatgtagaacgtaggtccccaatctacatttctttggacttttttaaacggacatttattttattttgttaattaaaggaatatttattgcctttatgagtccatttccattctcctaacgaacgatgaaatcatattaccagcaccaaattttgatggcatgagtgaagaatctagggggtgctgctgattatatacaatttcttaccactacagcgaaaggaaaagattagtccacttatatgcaaatccaaaatattttaagacaactttatcttgaaaggtttccagaaaagtacaaccgataatttagtgttacataaaaagtgaatcatataaaagatcttaagatgagtgtgtggcataccatttcagaagttaagggagatgacgagtgataaaaataatggtatggtagaatgtaagcaaattatataatgaaattgggtttaatttaaatgagctatgtgggtagttagttatacagtcaaattaaacagttttgttttattttttttcttctaacatatattaaatcgactatgagataatataattgaaaatgcgttaaacttttattctttatagaaccccaaaataataaatgtcaacattcaaaatgaaaaacatattatgaaaatataaaatttatttgataaattagatgtaacacattaaaaatactgtggtgtagaaaaaaaaacaggaatcatgtaatacttataagatgatatgagtaaaaaaaaccccgtataaaattacagtattctttgtactaatatttgaaatttggttaaaagtagattacgtttcccttaattcgttattgatttatagtatttttcctctttagttttctatcttcgtctcctaatttatatatgttgattagttaatactgcattattagatgacaattaaaaactaagtctagtggttagttggatgaagattaattactaaatctattaattagctgggtgatattgacaattcaaatatatcttagcacttacagctcgattggattttatatactaacaagtcaacttttaggccggtgatatactacatttagcgatcgtatgtataatgtatagttcaacttcaatttaaaaaacaaaagctgataatgaaactgttgcacgatttttttgtatatgtatcaagtatgttcattgtacatgaaagatatactcaattgcttatgctgtcataattatctaaattattaagtataattaagctatagatattgttaattacttaattgtattagtcacggaaactgataataccaagtcaaggggaaaccaaagattaggcgtgagacggttctcattgctgaccttgtcggaccaaagaccttagtcatgttactctgctttaggtttcgatctatttccaccaccgaaaccagttttgatttacaaataataatatttctctcattttatttaatcatataaaactctcagtgtttatttcgacccccgaaaatctttatctcttaccttgaattgtgttagatatatatatatactaatagtggaatcatttttcaaaatgtgaaaacgaaaaaacttgatgaagtttatgcaggtcattgtcatgctattgagtacatgctcatccagagttccatatatagaaccttgaaggtccctaatccttgagtcacatcctaaaggctttccttagcctatccaacctgaagtgatctcccaaccatttaggaatttgatctcgtttgctctctaaagctttaactactcttccgacgtattctccaaaacaaaaccaaggaaatttgaaccaacagttcacaaactccaaaatgtatgcacacgtaaatataagattatatttatggttttatgcaaaaaaaaaactttcaactaattttttttgtaactaaaccttacatctctaaaaaaatgtagatttattttataaagtcaaaaataatacacagtataaacctcacaactatatattataaatatttttctagtcatatacatcagatatataagatattaaaagaagagttgaacttcttatcgtgagaaattcgatttgataaattatttgtcaaatgtttacgaacttgacattagcatgaaagggttagaatgcatattattattgattttgtgtgattaattcgtattttctaaaagtgaaaaaaataaaattgagaaatgttttttgcacaaatcctttatatttaaatgatcgaccagacggtaattcatttgaatacattttgcttaaaagaaaataatacaattggatcggcgacagactgtatatttgttaaattggtcgatgataaacgtttgagttaaataaatattatcgacagacgactattccttcatatagaagcgacaattatttttttccagaacatttacctataaaatctttctacttatatttgtctgcgtgtgacttttaggagagtaagaaaatatcgaaggtcagaagaatgagtgaggaaaagaggaaacaacattttgtactagtacatggttcgtgccatggcgcgtggtgctggtacaaggttaagccgctgctagaggcggtgggccaccgcgtaactgctgtggacttagctgcctccggaatagacacaacgaggtcgatcactgacatccccacatgcgaacaatactcggagccattgacgaagctcctgacctcattgccaaatgatgaaaaggttgtgctcgttggtcacagctttggtggcttgaacttagccatagccatggaaaagtttcccgaaaaaatctctgtcgctgtattcttgactgctttcatgccggacaccgaacactcaccatccttcgtcttggacaaggtatctccttttttcttttggtattttactcttgatgatatgagcatagaccatcataaatatgaatgtatccacaaagtcttctttagtattaaataggtctaggcctcatgctgactagaattagtatgcatgtaatactttcattcctgatattaatgaattagcgcatgtaagatttcgtttctggagtttttggaatctactatatatatgagttctttttgtggcatatatgagataactatagatcatgtattgacatttgacaatataatgtacacgtggggttcaaaattaaatctactagttttttgaacatgtatcattttcatggttgttaggtgttttaccaccgtacggttcttgattttcttgtatatttaattgtaataaacttggaaaataaatctctgtttgaaattttgtaaattatgtaaaagtttggaagcaacatgcctcaagaagcatggatgggcaccgaattc

SEQ ID NO: 273 - DNA, 108056 bp, Arabidopsis thaliana
aagcttagaacaaactttgctctccacaagacaactcctaatcttattccaatttttaccattctcaacacgtttctgtaaccaagtagagtaatcaccaagtttatactctttataaccttttccttcaatagcttcaccagctcctttgttagtaacaacaaaggcaaaaactgttatacagaacacaaggagaatcaaaaggaacatgacaaagagataaacccaaagaagccatgtgactctacaacatgaacctattagaccagctattgctacaaccataaggaaaacaccaagagcaatcactggtttgtctaggaatctttcacactctgttgaccctttttggcttagccagattccaccagctaagattgggatcgagagaagaaatactaggaaattgagtatccctacgagattgttgctacaacgagccatggtttagattcagagagaaagattgaaactttgaggaaccctttagatgaattgagagaaagattgagaatttgaagaacactgaaacagaatttgagtgggattttgatgggttgatgaaacaagtttatatagagaagactgaaacgcgtgaaagtgaggaaatttggagaaggctattgcagagaagtttcgtttgttttggttctaaatttctaattgtctttaggaagtagttgagacttgaagacttggttcatttaggagaatgactttttaacttccacgcgcttttacgcgagtggtggatatttttggataatgacttgtacttatttaattatactttttatttagtttttttctcttgtgtatattttcttctatatttgatcttatcttatcatgattattaaataaatattcattatctatagattgaatataacttgcaatgaaataatttcataaaaaaaagtaagactgactaattttctcataatatatagtttatgaccataactggtttttagactaagttaagtaattatgagtttgcagctaattatataaaatttaatttcagtataactaaataattaataagaaaaaaaattatagcaatgtcttaacaaataaaagaagttttgtttaccacatttttattttgaaatttcttaacttttgtaatttttataaatcattaaaaaaacttttattttctttcctcagttgtgaccttctaaaaaattaaagacagattctgtttatggttataaacttacgatatataattttatttgtaaattgtaatacacaacaaacaatcttatttgcaatatgctgaaattatgattatttttttgtatctacagtttttttagttaaacaattgtttgaaaagcataccttagcctaatataaaaccattaaacctttgaaagatcaaatggctttcactttcatatgaatatcttatttctactatgtcaaataattgagtatttctttttccttttgtttttacttgcgtgagcaaaatgtaaaggcttccaaagtccaatttgtttttgtttactcgtaatatttgtcaacgtttctactcgtattttatttaatgaaattcaagtgactaatatatacatatgccactggaaaatttgcaatttgtttttatgcttttggaggctgcgttgatacctaacctacttattatagaaaatagacaatgggaagaatcaaatgacatgatcttttatttaaaaacatatgtagatcgtttgaatcaggctgcatgcattgctacctaagtacctaacctacttgcgttgttattgttgttgtgtacttgtgttgttttttatttttcttgttggattcctttgaagcactattttaaatttgtaatatacattattattggataacgatttttggtatttaaaacaatctatcatagatttaagtgaactagattgttttaaataccaaaaatcgttatccaataataatgcatattaattagattgttttatgataatttctcaaataattttttatattaataagatttgaaattttgacaaaaaaataaatagatttgaataacttgattaaattaaaaatgataaatagaagataatattgtaaatattaacatatgtaaattaggagaatggatttaatacattaagtgttacctaaaaatttaatccattctcctaatttacatatgaaatatttatattcttagcataaaaaaaaagtccgactatatttcaatttagatcattgtttgagaaaaatttcactttttaggtaaatgaccaatcacgttacaacatatcagtatcaaatccacataagacatccatgtgacacattgcatatgcaaagagaaaacgagacaccaaaattttgtacaaacaataatcagtcaatccgaggctactatattaaaaaattcaaaaaaaaaattgtgatttaatgatattttgaaagtttaagttttttcgtcctaaatttgaaaactgacacatttttgatatttttacctttgatacatccgtagaaaaaatatttacctactaaatattttcttatatgtagcttataagtataattatgtgaataacactaactaaaatagatattagtttatttaagtttgaaaaaaatgtgacggttagcttctcatagcttgagttttgtggaaactttactttattatattaaatatcatcatatcacataatatgatagtaacaaactaattagtaatgtaccatcaacttttctagtagtaagtactactttgaggaatcttgcactctgatgatatcaggaatatgatcataaacttcagagcatcaactcctagaagaaaccgagtgaggtggtccaaatcaacaaacctgaacacacaagaaccttgaataagactttccaaataaaagtagaaaaaaaaaacagagaattagaaattcaaaaaccatactcttattttctgggacaagggtttttttatacccgaacaatttacaaagtgtattttcataccaaaacaaatttgaaggatgaattcatacccaaactccaaaaacatttgaattttatagctaaactttacatttagtgcttaattcaaaatcgtaaataacgagtattagtcaactgttacagttgctgagtcaaatgacatgtatttgatgttatacttcaaaacgacatcgtgttaaatgttagaattaaagttatacaaaattttgtaaaaatcagatattgaagccacgacgtttcactcatttaggcagcttattaacatttgatcgacaactatcatgagttcgagacctaatttttttgtacaactctataaaattttaattctaacacttaaaacgatgttgttataaactcttgaccaaacctagatatgaaaatacgtttttcccctgatttgatgttagccccacgaaactcatgacccgaacctagatagtttgcttgtcttcaagcaaacgctgtccagatcaaccaagtgaagggacttattttcttttttccaatgattcggaattcaagacccactacactattgggtcttcatataataaaaggcccaataaaagtctccagaggaaacaaaactaatcgaaacgacgaaacagttaaggtaacaaagtaaacaaacacgattcccaaaacacgaagaaagataaagcaaagaaaaaaaaagaaagatgaagaatgtgaatcgagtcttcttctgcaaatcactatctctcgtcttcctcgttccttctttcactcgttctcatatccgatttacttactccgccgccggtgcttcttctcctaatcgagctattcactgcatggcttccgattcccctcaatccggagatggttccgtctcttctcctcctaatgtcgcggctgttccctcttcttcttcttcttcgtccgcttcttccgccattgatttcctctctctctgtactcgtctcaaggtaagctttgattgatccgccttacattttcgctaagatccggtggttttgtgtgattatacaacgcaatgttggttagatgatgcgattgttcttgttgatggattgtgtggaaatctgatttcgttagggaaatgaaacgatttcaagctatgtagttacttttgatgttcttgttgatggattgtattggaatctgtaaattcgtttgtgcaatgaaacgatttcaagctttgttgttactgtgtagatgtgaagtttttatgtgaatctggttagttttcgcggtggtttctgtcaatgaactatttctactcgtaacttttgtctatggaacctagaatttgatacagatgttggtttgaaacctctaacgcattgtttagatttatgtggatgttttttaccaatgtaagattggatctgtgttaagaatggagattattctggtgatggattgtagaaactcaatgcattgtaactgtttatataagatcatttgttttttagatttgtgtggatgtttgttatcaatgttatgatggatctgtgtggagatagcttgaaacgtttcgtgcttaatggattgtattggaatgtatagtggattgttacggaaatgaaacattgtcaagcttggctgcatctgttgacggattgtagaattcgtttaggggaatgaaatgatttcaagtttatgtgattaatggtctgtgattactaaatccttgaagatgtgaagtttgtcatgtgttttacttttttgtgaatcaagtgagtttttgtttgctgatttaacgatagagtttgtgtgctgtatcgtttggtaaaccatctttttatatcaaatagacaactccaagagctggatggattaagagagatgtgaaagatccagaatctatagcggatcacatgtatcggatgggtcttatggctctaatttcttcagatatccccggtgttaacagagacaagtaagtttcttgcttgcttctctcttttcaagtttcaactgctgtgaaaaaactcttcttatatacatacttttctttctatagatgcatgaaaatggcgattgttcatgatattgcagaaggttagttctttcacttttagagatttttaatcatcgattttcttaatcacgagttatttagtcgagttgttgttgagcagccattgtaggagacattacaccttcttgtgggatatctaaagaagagaaaaaccgaagagaaagcgaagcacttgagcacatgtgcaaactcttgggtggaggcgaaagaggtctgtttctcttctattgttgaaataccttatgtatcttcgttcgaccttcttatgctcatttgtataacacttatcatcacttctaaaaatgtatatatcgtaattgcagcaaaagaaatcgctgagctttggagagaatacgaagagaactcttcacctgaagccaaagttgttaaagatttcgataaagttgagctgatactacaagctttggaatatgaacaaggtaatgaatgaccaataaaagaaactctctttcgataagagatttagcagaaactaatactcatattgttttttgtttgctatttaacgcagatcaagggaaagatctagaagagtttttccaatcaacagcaggtaatttttgttgtatgtcattatactctaaatagataatctgaatatggttgaaggctttaagcttgttactgtttgattcagggaagttccagactaatataggcaaggcttgggcgtcggagattgtttcaagaagacgaaagcaacattagttctcacttgactctttctttttgtttcttaacgtctagctcagtggagttcaaatactcgtacgtttcaaatttaatcatcttaaggtttttctaataatcttcgtagctgtctttacttgttttgttactatcactaataaaagatagctagctagtgactatcttatagatagctaatgaagatcaaaaaacttaatcaagctcttaaattttattttaagaaagtatcattggttcctcaatataaattttcggatcgttaatagaggtcaaatgatttttctttgttttgttttgtttcaagattttgcacgggttaaaagttgaataagaataacgaatagagtatagacacttcataaagtgtagtttccctgccacacttagatctcctactaacctcacttagattagatttctctctagtctaaaagtctttaaaccttttaccattgggtttcacaaaattaacattagtagttatgtcttttctttttaaaaacatattttagaataaaccatatctccaaccgaaaactccaaactctctccgacgcttatccgcatagttcttttgtcgattttgagcttcttttatcttaacctttaagattttgattttttccgatgttcatgttattaaccacaagtctacaattaaattattatatttttttaaaaatgattcttgcgcgagaagctacttagtggactcggaaggagaagggaaattggtagaggttttaatttgcaaaacttataataatataatagtagtagtcgtaacaaatggtttagctgattattcaacatggaacttttcaaagaatgtttcagttttagttgaacagacaatttttacccttgtcgtaacaagacaaataacgatttttccgactctcttcattcgatctctctccctctccctctctcgatcggaaaagtttgaatctccggcgatcttctcaagatgagtaacaacgagcttctcgaaatcgagcctatgtatcttcaattcccttgtaagttttttttttgactttttcttgttttccctgattttgcatgtctttcttgtccataaccagattttgttgagttatggtttactattaaatttcgctattcacttggctgagttgatgtagttgaattgaagaagcagatgtcttgctctctttacttgacgaacaagacagacaataacgtggcctttaaggtaaaacaaagttttccgagtcattaaattgtcgtgattatctcgtgtttctaaggtttctcgtgattctctttattttatttgaggttaagacgacaaatcggaacaactattgcgttaggcctaattatggacttattcttccaaagtcgacttgtaaagttcttggtccgttctctaatcgttttcttggggaaactttttttcccccttcaactgccaaacttgttcttggactaggaatttgatgaatctttatttgttgtttgtctagtgaccatgcaagctcaaaaggaagttccttctgatatgcagagctttgaaaagtttatgattcaaagtgtactggctagtcctggagtcacagccaaagaagttactcgtgagatggtactgattcacattgttgatttgatgaataattcacactttggcttttggttccttaaagcatttgtttcgtttttttctgatgagcaactttgcagtttagcaaagaatcagggcatgtagttgaggagactaaactgagagttacttatgtttgctccaccacgaccaacatcactagttcaccaaggactagaagagggtttatatttcagtgtttttgttagacattttctctttacttcattgacgatattcatcaccagtaacactcttagcgatgtctcttgctatggcgtttggagctgcttgccacgagctcgtaatagcggctggtaaaactcgattgattctgtacagtaatttgtttgtaaaataattatgagacccagtttactttgtatataatgcactaaaatctaaacatcactgaccatctatataatcatatccttatagctcaaacctttgaaattcaaataaaataacacatatcttagataggcgtgggcattcgggtacccgttcgggttcggttctttttttccgggtatcgggtctattcgggtaagaggttgagaaccattcgggtattctaaaaattcagttcggtttcggttcggtttcgggtcggttcggttattttagtaaaaatgtaaaaataaccaaaaatacccaaaatatttttgggttcgggttggattcgggttttttactcatatatacccaaatctacccgaaatacccgattgcccgtaaatatatttgttactttttatacaaatataaccaaatgtaaacaaaatacttaaattacctaaaagaaaactataacatttgttacttttatcccaaatatatccaaatgtatatgaattactaaaagaatctagtataatcggatttataattttaattttgggtgtttgaggtattacaaatatatatataactaatatatttaggttacatttgtattcgggtacccacgggtattagattcggttcgggttcggttcgagttttttcgggtagtgaagtcgaggacccattcaggttattctaaaaatcggattcagattcggtttggttatttttcgggtttttcggttcggatattcggttccgggtattatgcccatgcctatatcttaccatcggataattctttatttatttatttttatttattttttttttatcacaaagaggtgtccatattattcataagagctataaaaagtcaaagtaactaataaataacactacaaaggtgtccataatccgtaagtaaccacaaagacgtattcataatccgtaagtaatactatttattcttagtgaatcctcttttcctttctgatcttcggcggctctagtactggtagtaaggtttgcggcagaagttttcgaaatgcttattagcaatcagattcaaaccagcaccctcgatctttccataatgaccgttgcccactgtagaagattcttcattaagcatgcttttgttcaattccacactaagctaggaagactttatgagtgattgaggtccatagagcgtatgatttcttgtcctacaatgtcacgtagatgagcaatcttgtatgtaaaaccatccttatacaaagcctttctgtgctagtgaagactatcctgaggaataccattcctcgtgtataagaagaagctaaataaagtttcaagctttcccagattcatctctggctaggtgagagtgtcatgaattacaacatccgacatggttcttagaacaatggatcttgctcccaagataaacctatgggatctgatcccaagcataagtcatcatccgttttcactagaatgtcagtgagatatgcactaaatttaatttgtcttattgaattcatttatcttaataacctaacttagggcctaattggcaagttctttagagtctttacaaagcaaaaaaattctaaagctttgaaatagatctaatcaatctttagaaaatttgactttccttttcttactcacagccaacatatttccttaattaatatttttggctgtagaaagcagttttttttcttctaaagcacacaaaagctttccaaaattttaaattctacaactacagtcacatccaaaatatctacggcataaaatttacagccaaaaatctaagctagagtcagaacatatcatacccttaattttttttaaagtgctattagttaaagtgattatgtaggaccaggcccgttcctacggcatataaaataaagcattctcctactgccatttttgaaagggacattatacttatcagtaaaatctaattttcaagtgctttcttgttgtttatttttatcaattactatgcttctgcttgaatatctaaaaatacaagtgacgtaaattgtattatagtagatcctatatacagatttatcttatagacgtgtaaaagatattcatgaaatatcaaatagatcattgagttttcaccgttgcagataaatgttttgattacgaagttattcataactaccgttgcagataatgtttaaagacacaaaaaaaaaaaaaaaatgttcattgttcatgtgttgaaaacaggaggagggaaaaaaacattatttcgtataacattgttacatttcataacattataattcaacatgtaagtttagatgatagttctattcatttcactataaaatcattattgactattacatgcgtttattaactcacaaaaaaaccaatattttccagagtttctaaaagtgactatgttttctatctagaataaaactggttataaataatcgttattcaaaaaaatgttgtcgacgagaaaataaaataaaaataaatgttggtttggttgcaattggaaggttgactaaataaataagaactcaagaagataagaaaagaacaaaatacaaaccaagcaacttttatatcttcaagataatttctcacaaatacattaaattgtgaatagtagtgattccaaattataaaacacacagtatcatgatttcaactagatcgtctaactagcaagctgtaggataatctctcttttgacatctatatctttaaacaaatcaacaaaataaggttcaacaagttcttggagagcctcaacaacgatgttctgtaattttatctgtcatgatatctctttccctactatgtggaataaaatttttcttcattgactttgtgtttttatgatatttttgaacctctcttagtgcaattgtttctggcaagtttttgtgtgacttatcacttatctaataaactttttttcctttccaaaattgactgagtgacgaaggtaggaaataatcaattttagaaaagaaaagagttaaaaagatacgacaaatacatgcctgccgaggacagtggcactgagagagatcagaaaataccataaaaagcacaaaactaataataagaaaatttcaatccgagaaactagtgaaaaaatatcatgaaaatttgcgatttcaaaagtgttgttgaaacttttcaagaaaattgtgaagcttatcttgctgaactgtttgaggatacaaatttttgtatagtacatgcaaaaagagtgactatcactagcttgctagaaggaatcttgatgatcgaactcgaaaccatgtaaattagctagagaaccaataatcgatatatttcctctctaattgttatatgcggtgctttacatcagccaatgagtatgcaaaatacttcaatggactttctagaaaagaccatccatttttcataacagaataatgatattgattcataaataatctctaattttttcaaataactgactaaataagaatcaaaggaaaataatagttcaaagaatctaaattatttttcttatttagttaattatttgaaactttagaggtaagtatttatgaatcataattgtttctgttatgaacaatagggattggatttttctagaaagttcattaacgtattttgcattcttattggttgttgtaagttacaacaaatcacaatttgagagaaaaagtttcgatcaaactaatctacagttgttctagtcttaaatgatgataatgaattaatgtttttatctgttaactcaattttcatgcagatacagtatatgacgttctaaaaattcattagtttttcttttgatacaacttagaaaagcctgttttcagcagcatgatgcttctactccaagttttgttggcgtgataactacttaacgaataacattgtgaatacaatcaaaacatcaaacattttggtgaaactggcaaacaatattacaaatgatttagacagtgagagtgtaacgttactcaacaaaacattgaaaaacaaatcctaacataaagccatggcacgagaataccaaagatatcataattttcaaacgagtgtaaagagccatggagatgtggtaggttattcaagttccaactagaagctatgtattgattcatatctctttttttggttcccatgtcccctccgttgtaaaaaacccacttccaaaaacacggtttttcaaatcaacaccataatatacatgtaacaagatatcgaataaacaaatagttgatacaaacaaatttgctttgtgtttaacagtttaagaacgaccataaatagcagatttgtttgtaataacaatttttttatttgatttctcgttgcaggtatattgtggagctgatttggagaatcgacttctttgaagcggattttacaaagaagtaaaaatgaaaaccagaagaagtgatatggataaatacattgcttatggttggatttctgaataacctagcgcgtctacatggatctctactctcgtttgagagttctgagatcccggtgttctcatgctcgctttatgttgacatgtgtttttcatcattttgtttggtaaagtgtaatttcacgttcaaatcattatgtacttctgtttcctaattctcaccaaaatacttgatatattgccaaaagagcgcctatctctaaggatttacactatgctagaaggaccctagacaatcgactttgaaatggtgatattgtatctattaaattttgggtattttttttctcatttcaatgcattctgattatcttaagaaaatataatttgcttggttgatattttcttctcttgatttacactattttgttgatttaaagtcaaaccaagttaaaccatgatccaaacgtttatactgtttgctttcaatctagtataaaaaactattgtagtcatatatatatgaacctctatgatcattcaataatgactaaccttgtcagtaataccacatctcgaataaaccttgcttcaatgctcacagttctttagtatgtctccacttcctaccaacaaacaaaaacaaatgatcaaatcaatctccactttcctttaaaccaaagaacttgtcaatgaaaaatgttaacctcaaatatgtttagaagtcggttcatctttttgggcacgtagatttgttaaggccaaagatgtagtttccttatttttcattcatatccatttctttatcacctctttcatgaacttcaaccaattcatttttctacatataataaaatcaatttcaacaaattaaatatgaaaattttcttagatctaagatcacaataacaacaaaaataacaaaacaattcaccgaaaaaaacaaaaataacagaacaaaaccttttattatcccaaattgttggctagccctaccgtcacttagatctaagatcttcggagttaccacacatgattgccactgctttcacccaatttctgatatgttttaacaatataaatcatttttcttctataaaaactaaaataattttgtataatgttggtataaatttaaaaaataaaaacaaaataaaataacttaaaatcataaaataaaaaatctggagaaagatctaattatcctcatcatcgtcatcttataaaagtcatcatcaagattcaagattcaagatgcccttccacaaaattatttatcatatatttttttctccacaataattattatgttatttcttctgttttttacataaaatataatatagatacaaaagatatatgaataaaaaactaaactgcaagtagtatatatgatgaataattgttagatctaatattgtacatgactataaacaaagatccatatctttttgttgtgagaacttcatcttttcatccaccgaaatagtttggagatttaaactccaactatagtttctcagattttttaatatttagaagaattagataaacaaaaactttgtggtatataaaattagatgttcttaggtagatcaaacaaaaactgtggggtatctagagttagatgttctcacctatttatattgaaaataaggatatgatgaatttttttttaccaaaaaagcaaataaacaaaatttataaaaacaattatttaacaaataaaaataatgtggtatataaaattaaatgttctttaaattttttttcattattattattttttaataattttgttacaatctataaataaaataatataaaaatcagtattaaaaaaattcataatgtaacaccaagatattggcacaaacatctaaaatgattagttagtcttttaatatatccctgatagttcaaatattttttgaactactaaatttgttataactactttacgcgggagcatttcaaataatataatttaaaacgatttgcacgtgatatttaaaatattgttcatattgttatatctacttaacaactaacttatttattattgtgatgaatttgttactatatatatagtcaaatctatcataaatttatttcattgttaataatatgaaaattatctttttacatgtatcaaaaattagttttctttttgtatttataaattcttagaaacacaatatataagtaatatacaactgtcacaagaattattttccaaaataccaataaatacaaataatctaatagtattaatttttcaaattagtgatattcaccataaaaaagtaattatctattcagagtatatatatagaaacaaaatttctttgttggtattttttttctagtcaacttttagtacttagaagtaaatctttttttttataaattatgaaagttataccatttttataattagttttactagaaagaataggtaattattgttggtcaatataaataacaaaaatactgatttatatgataatatgttgactacaatgaataatgaataacaaatctattataaatttataatatgttgactgcaatgaatgtacaataaatttttaaagggaaattgcactttgtatacatagaagattacaaaattaaatgtcagaaaaaattactgttgaaccttctctctctatcatgaaaatactcttatacccttataccatatttgctcttaccgttaaatattttgttaccttttaataataatgttatcatcttctcataattatacaatctttgaaatcaaatcgttggttcaatagctgataatttgtttatatcgtcaattgtattattaacatgttaagtaggtttgtaccctaagtttttcatccgtatatcaaaattctatccatatttcgctaacaatattatcccgataatacgttatctgctaactattctgatgcatgtattttttctatatgattattcagtcgcaagtcaatttttttggttttcatgataaatattttgttatcttttaataataatgttaccgtcttcgcatatatatgtgtctttgaaatctaaaaattagttcaataactaaaaatttgcttatatcgtcaaatatattattaacatattaagttggtttgtataccatgtcatttcatccatgcatcaaaccccatccatatttcgctaacaatattatctcgataatgcgttatctgctaactatccagagttttatcatatctaggtatatttgtcatataaattttagttgataagagatacctaaataaatggtcttatgtatagattcttaattatttgatgatgcatgtatagatttttcaatcacccatttttaaatgtacaggctggtatcaaaatgttttctattggcttttaaaatacaaattgactgtactttggctgttgagaaaaaaacaaattgtttgactagtgaatttttttttatgttgccttaatttccaattagcacttactaattaaagtgaaaatatatctaacttacggtaaccttttataaattaatttccgattagcacttactagttaaagtgaaaacaaatctaacgtattgtaaaccttttataaattagtactcgtattactatctctcatgccccaaaaatatatatactctcctatgaatggaaacagaaccaatgtggtgaataatacacgacaatcattgatggttctatttatgggtgggtcagatggaaagagaccccttatcctgttcatcaccatgccaaagtgttgatcagttcacagttagaacacatcgaattccgacagcagattggttcttactatcttaattatattgatttaacacattcaaagaccactaggctcgtgttatgctaggtactatgatatatttgatactgatttataataatgtaggatataatctagagtcatcctctcgggtctaccactatagtcaccttattatattgatgattaggttttgtttcctctccctgcttctgtgaaattggattcacttaatgaagatctttcaaagctattatcatcttctgatggctctggagttgtttcttcttcgaccgttgcatcttctgagtataagcttaaagcaactgtatgtgtattcccttacgatatatgttgcactaacatcgctacttagaagtcgaatccttgtgtgatcatcaatgttgtgaatgtatcatagtaacaaaaaggatagttcccagaaagaggaaagttttgagattttttgttgtgttatgccctgaacaaaaaagacattgcttaatcaacttttgatggttttgttatttatacttccaaactattgttttgttggatctattatcttttcttcctgcaacttttgatgtgatgttgaggacagttcaattagtttgattccttagtaacatgataggttagggtgccaattttttttgttttttctcattgaaaaataaaatacacctatttggagaatgcattctctataaggaatattattaaataaaaatacgccattaggatattggttccgttttaggcagttttgaaagttggggcttgtggggatattgtaccaactaaattcgagtaaagcttatctaacacagtagcaacacaagtacaatgtttatctttgctgattcttggcaggggttaaccagattctcctgcataaatcacgaaatctgagtttgctaaggaattctgaggtcagattatgaattttagtttacactggacaaatatttacgtattatatacatttgagtccaactcaaaacaagtcacgattgggagaaaagatacgaggccacgattttgtgtttacaaggaaggccagacctatcccttttgctccttgattcctgagagaaactactatgtctcggataaaggttttgccagatactgacgccattcttctggcatgcccttattcgatctcagcatccttatagctgcatttgttaatggtattgcaacaatgtcatagtcttttggttcctgccatttaccaacaatcaataattccccatcaaaacaaggttttattatatcttagactggttagtaaaccaatagcaactatgagaaataatacctttgggaccttaagtaacttcatgtgtgcttcgtctgctgtcttctgtcctttccttgagttgcatcttgaacatgcagctacctatgtttcatgaaaccaattgaagaaaacaatttaacccatcttcaatattcttggctacaacatatatgctacttcgatatcaatcacatactaggttttgccaagtccattctccacctcgagaaaccggcataacatgatcaatggtcaaattttctcgcgaagaacaatatctatatcccaaataattaaagttctgtcagcaacaatagtttgattccgcaaaaacagagagatatgattgcgagtagagatagaaaaccactcactgacaagtataatcgtctcgtagtaaaatatttttacggctaagtgagtttttcactcttcttcttttaacaacctgaagcaaatgtggaacctgaagcaagacaatgaagtaagcttcaaactggcaacaagagataaaaactggctaactaaactcatattctacatacccttaatacagctggtatgtagaacgaacccgtaggagaactaacagtctgatcataatactccaaaacgtcggcctagacaatgcacaaaacctgaattaaagatcattatacaaataagcaactatatacctactttttacataatacaaatcctgcgtttttgttgattgggaaatttcttgcataatcgtattagaaaacgtcattatgtcattatgcgtgttaccaatcagaccctaagtatcaacatgagttaaaagtcttttggcctgaccttatccatgtactcgaggcagattgcgcgcttccagcaaaccacattgaccggcctacagtgacacaacatgcttgaacttgaataaagagagaactaatgcttcaatcaactatataactacatatattcgtaacacaaacgaagaatttccatatatctcttttaatatatcctgttctaagatcaatgaatacattgtaactaaaaataataaactaaaatgtaataatacaaaaaaaattgttgacctgtatgaaatatcaagaaccaagcctctgaagcaagaaagatgatcatcagtctctaaaccatcatcgtctccatcaaaatcccactcatcgttgtcttcgtcaatatcaagatttttctcggtgttatcgagatccctaattttctttctcttataaggaaaagagtaagatgagaagattctagcacaaaactttagtcggctcatgcgtattggaaccaaaggagatccaccaccggccatgtaaaggctctgccgaaattggtctctcgaatctacaccaaaagataatccatcgttgcttgagagaagcttaagtctagcagagaaatgtgccatttgattgaaacgaaacgaagaagttagggtgatccaaagtcttggaaaattattaggaagagaaattgtttacacaatttggacttgagcagagccgttaaccacaaactgatttctatagaaaaaatatcatgctctataaaatgacgaatatggcctcttatctttctaccaagaaattagaaaaaaaaaaaaaaaaaatcatattcgacgctgccgacaaatcacaaattttcgcgctaagctaagtatcgatttttagtttaaaatttggaataattgttactcgttatataaatttggaatttaataaaatgaaattaaaaatatgtatagtttgatagatcccaaaaagtattcaaatttacataaaaatagaatataattttgatactttttgttaaattttttctattaatataaaaatttgaattgtttaatagaaatttcagatatgttaattttcaatgataaaaataatatttcagatatgtgaagaaaaaaaattcagcatttcattacatttatataaaacacacaaagaatttttgtgtgtttgaaacagtacaaactatagttacaagttacaacgtatagcacctcatgaagaggcaaaagccaaaaagttgcagaacctgtgaaatagtgtttgatatttccatgtatgatgtattgtcttaagacctcatagtttcgaggttatgcggcttaaagttgcttctatagatccgtgaggttcattggtttggcaggtacacatcatctttaaactgcaaatgcaattcattggaaacgattcatatcctaaaattattggcttttatgcaagtttttttttgttgtctgattttaagtttataactatgtactactgctgctacttttctacttatcattttcgtttacgtttcgtggtttcatcataaagacaacatcaaatagaggttcttaccttcaccattgaagggttttgcttggttgaaagtgtatatttggcagttttaggtgaatcgatgatacatcaacgaacctgatcatgttaataagaacctttatcatggtaagaatcacataatcacacaaacagcaaaataaatatatactgatatgatgataccttttcagtacggcgcttcccatgaggaagagagtgcgttggacagaagagctgtacacaccagtttctggtggaccaaagaaagtatccattaggactttctttacgtctatgaacttctcgctgaaatagagtccctttgttgggatgcttgcaactgactcaaacgagtatgtcatcgtgaacgtgtatgtcggttctaagaatcaattacagataagaatgtagcattactaattaactcatacctacaagatattcgacagatacgttattgtctgccttaattaaaggcttaccttaaaggtaaaacaaagttttgggaatcattaaatagttgtgattagctcgtgtttctaaggcttctcgtgttttttttttgttttttttgaggttatgacgacaaatccgaaaaactattgcgttaggcctaattatggacttattcttccaaagtcgacttgtaaagtccgttctcaaatctttttcttgtggaaactttttttttcccttcaactgccaaacttgttcttggactaggaatttgatgaatctttgtttggtgtttatctagtaaccatgcaagctcaaaaggaagcccggcccatctgatatgcagagcaatgaaaagtttatgattcaaagagtaaaagctagtcctgcagtcacagccaaagaagttactcttgagacggcactgatcattcacattgttgatttgatgaataattcacactttggtttttgattccttaaagcatttgtttcattttcctctaaagatcaactatatattcagtttaacaaagaatcggggcatctagttgaggagactaaactgagagttacttatgtttgctccaccacgaccaacatcaccagtccaccaaggaccagaaatggtttatatttcaatgtttttgttagacattttctctttacttcattgtagatattcattaccagtaacactcttaccaatttgtcttgctatggcgttggagctgattgccagagcaaaactcgattgaatctgtacaataatatgtttgtaaaatattatcagacctattttgtatatacatattgcactaaaatcttatatgaaatatcaatgaccatctagataatcatatcctttacatataagggatgatgttcaaaggtttgagcttggactgtacatatttagagacttatttcttaacctaattaaacattataaatattttatttacacttactatgattttattagagtatcgtaccagttagatatatatgagggtggttcgagatctagacttattcgtttgaaaagtaaatctgcattttgttcgtttcatgccacaaaaacgacagcttgccattgtatccagccattgcgtcattccagcagaaatactgcactaaaagctaacatggtggtgatgcatgtattagcgacttgccaagtttgcattaaaaccttttttctatagttcagagactggcgcttggatctcttcgtatccctcttcacacatttgacactcccccaaaaatgtaaatcttgtcgttaactagttccacggctgcggaacggctggtcgcaagtgaacttggactctgacgcaactgcacagactaggaatcgaggatcgacatgttcttgtgagaatatttgatgtcaatgtatgaaaaaaaaacatacacataaaactttaaagaaaaaaaaaatcgaaagtgtgaacttttcttgtggttaattaatttaccaactttaatcaattttccaattaaattgttaattttcattgactttgctaaataagacatatcgctaaatcaactaagggaccaatttagttaacgggtttaagtcaccgttaacttttaatgtctccatttgactattgttttcacctttgatttatttatattttttaagtatttaaaatgtatataatcgctgtaagaatttctaaacgaaattatttttcattccacgaaattgtttacaaattcctcaatttgtttatgagtgatatttacattttttaatgttattatgatattaattagtattcttttagcaacaaaagcaacaaagagtctcaatcaagagaacaaaatgtacaccaaacaacttttatatcttcaagataatttctcacaagtacattaaattgtgaatattactaagtagtaactttctatattaaaagacacaatatcattatttcaactatatcgtctcgagtctaacaagtaagctgtaggataatccctcttttgacttgtactgacttcatgctttttgatatttttgaatctcccttagtgccctgtttctggcatgtatttgaaattgtgttaccctttaactactttcttttccaaaattgactatttccttacctttataaatcataatcaggtgtttcctcggaggcttacggaggtgttatagtttggaacgaatcattatgagaagttaaaatttaaaatgtgaaaaacttaaatttgattatgaaagatagattttgagattctttgggagaaaatttattcatttacagaaaaactaaatgtaaattagggaaaaatagttattcaatgaatttttaagttgatatttatctgcatgcatggatttttttaacatcgataatgacagcaaatttcttatcacctttcaagattagaacaatcataattcataaattagctagagaaccaacaatcgatatatttcctgtcaaattgtgatatgcgatgctttacatcagccaatgagaatgcaaaatacttcagtggattttcagaaaagattatccctttttcataatagaataacgatattgattcttaaataatctttaattaaagttttcaaataactgtcgaaataagaatcagaaaaataaagaatctaaataatggttattttttcttatatagttaattatctagaaactttagaggtaagtatttatgaatcattattcttgttctgttatgaaaattagggatgagatatttctagaaagttcattaatgtttttgcattcttattgggaggaaaactatcgatctatcaaacctactattgttctagtcttaaatttagtgacaacaaattaacgtttttatctgttaactcaattttcatgcagataagtgtcatcttaaaaactaattagattttcttttgatacaacttagaagagtcggtttcagcgacgttccgcttctactccaagtttcgttggtgtgataactatataacaacaaactttgtgaacagaatcaaaacatcaaacattttgtaagtatattacaaaatgatttagataatgacagtggtgtaacgttacccaacaaaacgttaaaaacacatctcaatatggagatatgacatgagaataccataaatatcacaatcctcaaataagagtaaataggcagggagacggaggtaagttattcaagttccaacaagaaactaattttttattcatatctctttttatggttaacatgtcccctcttttataaaattcacttctaagaacccgattcttcaaatgagtcccataatatacatgtagcaagacatcgaataaaaaacagttgagacaaacaaatctgctttgcgttttgctgattaataacgaccagaaaaagcagatttgtttgtagtaaccatttttttatttgatgttctcgtttgtaggtattgtatggaactgatttgtaaaatcgagtctttggaagcggattttacaaaggagtagaaataaaacttgtaagaagtgatatagataatacatagtttctggttggaattttgaacaacctaactagtctacttggctcgttattctcgtttgaagattgtaaaatcttcggtgttctcatgccatggctctatgtgggaaatatatttttcatcgttttcttcggtaaagttatactctcaatatcaaatcattttgtaattttgttggctaattctcaccaaaatattttatattttgctaaaagagccactatcactaaggatttacagcttgctaaaaagtctctagataatctactttgaaatcacgatattgtatcttttaaattttggggttattattctcatttcaatgcattcattagattatcttaaagaactaaaatttgcttggttgatattttcttctcttgattgacaatattttatttaaagtcaaactagattgaaccatgatctaaacgtttatatcttacactgtttactttcagtccagttttagaaaatattgcagccatgtaaaaagactatatatattaacttctattgtcattcaataagcactaaccttgtcactaatgcctcatctccaagaaacatgcttcaatgctcacaattctttagtatgtgtccacttcctaccaacaaacaaaatcaagaaaaaaatgatcaatattaatctccactttccgttaaatcaaagaacttgtcaattacaaatgttaaccttaaatatgtttaaaaattggttcatgtttttagccgtatagatttgttaaggctgaagatagcgttttctttatcttcactcaaatccatttctttataacctgttttatgaacttcgaccaattcatttccctacaaataataaaaatgtgaaaattattttagatctaagatcataacaacaacaaaacaaaaccttttactatctcaaattgttggctagccctttatcattgttaccacctcagatgctactgtcacttagatctaagatcttccgagttaacacacgattgtcgctgctttcacatatatctgatatgttttaacaatataaaacggaatggttattaacattgtttttcttctgtaagtactaaaataatttggtattatgtaggtataaatctaaataataaaaacaaagtaaaataactcaataatcataaaattaaaactcaggagattaaagattaaagatcttatgaaaagtcatcatcaagattaaagatgccctctaacccaagaatttattatgttatatttcttctatatttctcatataaagtataatatagatacacgaaatccataaaacaatttcatattttaagacattacttatctgcaagtaatatatataataaattcttgatagatctaatattgtacatgaatataaacaaagatccataccttttgtttttgtgataacatcatctttccatccaccgaaatgaatcgttgatttagactccagctatagtttctcggatttttgatattttttttaacaagaagaattagataaacaaaaactgtgtaatatataagattagatattatgaggtagatcacatagaaactgtgtggtatgtacaagtatatgtccccacctatttatagtgaaaataaggatatgatgaaagtttttaccaaaaaacaaataaaagtttttgataaagaagataaattaatttcataatgtaacactgaaatattggcgcaaacatctaaaagggttagttagtttttaatattttcctaatagttcaaatatttgtttcactgctaaatttgttataactactttacgcgggaacatttcaaataatataatttgtaacggtttgtgcacgatatttaaaatattgttaatatttttctatctacttaaacactagcttatttattatttagatatttttgttactatacatactgttaattcactagtaatatacagctgtcacaagaattatattccaaaatacaaatagatataaatatttttagtactcagtattcaaattaatgatagtcaccaaaaaaaaaagtaattatctattcaaaatatataaaataattttatagaaacaaactttaacagttggtatttttttctagtcaacttttagtacttagaaataaacataaattataaactattataccatttttataattattttttactataaagaatatgtaatttatgctggttaacaaaaagaacaaaaatacagatttctattataaatttataatatgttgactaaaatgaatgtacaataaatttttaaatgtacaggctggtaacaatgtttttttctatggcttttaaagtaaataattaatatctctttgactgttaagaaaaaaaaatgtttgactagtaattttctttttttatgtaacttttatttccattagcactaactaattaaagtgaaaataaatccaacatacagtaaaatttttataaattaagaatcgaaagtaattattactgtagatttttacgagttgagcaagtgtaatatttgacatactttgataagataataaaataataatctttaaaatataaatatatggtctcatcaatactataaattaataattgtattaatatatcaaaattttatatattatatgtaagaaaagttagtgaaatatgtttttggtgttttttttttttttcttgcttttcattcattctttgtagattttatttctaatatttgtgttgcatataaaaaaaattggttttgtcacaggataattgtttttacttgttattggttataaaatattgattttaacgatttctttttatttttgagtagaaattttataagaaattatgaaattaaccaggagtgaaatacattgagaacttgcaaatgtcagatggttcatggtacaaaaactgggatgtatgcctcatttatgcaactttctttgtcgtctgaggtctagtggctgcaggcaagacttattagaactgtgaggcgatccatagagcggtttgcttccttctcgagaaacaaaacgttgaaggcggttggggagagttatctcccatgccccaaaaagatatatactcctttggatggaaacagaactaatgtggtgagtatatacaagaaaagcattgatatagttctatttatgggttgtcaaatggaaagagacccttttcccgttcatcacggtgtcaaactgttgatcaatttaaagttagaacacgacgatttccgacaagggttgttcttgacttctaattgatttaacacattcaaagaccactaggctcgtgttatgttaggtactatgatatatatgatcgtggtttaaaataatgtaggagataaggggagcttacaagatgaatttgttaccgcactatccaattataggaacgtatttactctttgggaactcacttattacacaaaagctcttcggaggacttgatcaactttgacttaacttagttatatcaacagttttatgtcacaccttcttaactattgcttttttaggaccgcaaatatctcggtgtttgttttacatgaattctggtattttatgtcttgaaaattgataagagactatggttaagttgattagggcacaagacgttaattaattagttttggtgttaaactttatgagtttggttttcatatattcctttttatgttaagtgttttctttaatgcattagggttatgattaagttgtataaaggcctatataagggtctctattgatcaataagaaagaaacctccaacaattaacctaattctctagaaagaggtttgggttaaacgaaaggttttgcttaagtctctcattctacttcaatcaatgccactggtctagttactagatcaaagtcggctcatatcaaagtatagtcccaaaagacaaaaatctagattagtgccttattagggtttgacatgttttcttcaaaatttccatttcagaccttaaaagttattcagaggacataaattttatctatcctctcttttcaaacagcctcatctttacatcttgcttcgatgagagtttctagtttgagtgcattgtggtcgatttcaactttgtagaaatttatggtaacaccatatttggtgcatgctctaaaacagattttgtgtttgtagagaaatagattgacaacggcaaagattaattagagtatgagaacgtgactgaagactgtgatttgtgaacatgagagaatcgagtatgtgacgaatttagaagtatggagaagatgaatacactttattagagctcttaggctctcttagagctattattttcttataagttaagtgattacaatgcataatataaatagaaaaaatatagagaaatttgttgttgcaaatacattaaatgataagccctccatgaaggagagtttcaatttcgttcattaattgtgcatgtatatgagagagaaggaggtgtggcaattgcaggtcacaatacataatgatcagattgaaggatcacctgaatctgcacaatagaccatcactttggacggccatctcgggttctctatatattattagagtcatccatagccaccttattggatctgccatcttctaggctgcctcttggttaagctaagttggacttgccacttggttcaaccactttgattatctatacagtctgaattctcacagttagttccacaatcgcatccacatgctttgaagactcgtgatacacttttctttcattgccatcttctaattctgacagttagtaatctgattatattcagtgagactctttatatgtacaatgttttaccaatataatcggatcactcactttcagaactagaacatggcaatgaaggaaaagtaactctggactttgccatgtcatagttcaacaatttgtggcttttccatgtatgcacggaaacaaacaaacacgtgcctatatgcatcggccaaatactcaacatccaattatagtatgccacatgtttaatgaatgattttcacaaactttgaattcaaagaaaaactatatatacttattatatagatataaaattaaatttacatagatatatcaacttcaagaatcttttactttttcatatgttcatgggaattattcttcatttgcaaacgtactcaaaacttacataattaaaaaatatatgtataagatagatcacgattctttgatttttttttccggtatgattctttgattccgaatgcaagttgatgtattattggcagactctactacaaaaccatgatacaaacggcatcgtatcaagttcatcactcaacgagttcgatactagctcccacccaaaaaaaaaaaacacatcaaagcaagaaattgactccttttagcttcatagctatgaatttggaaaagaaaaagtccacaaagacttcattgtgcagtccacaacctatgtcaaagaaccgtgcaccttgattttaacattgggacgaccagataagtcgttgaataggttagaatccgacgataactgtggaagatcatctttaacatagatgtccatctccttcaagcagggcaaatagtacaagaaatgcttgatcatgttcttctctctcaactgtccttgaaactcacgaatctctaacctcttcacaggaaaagatgcgagtgaacgacatttctcctctcgagaaatgcagttacaagcgtccccacagtcaaatgtgacacagtgtaagagaccaccctaaaagcagagaagagacattaaggatttccctgaactgaatctctacaaacgtgttattcaagtcatttgatagtttatgttttataccttaatgactagggtttctagatgtgaacaagttttaaggagaaccggcattgcttgccacgctgtatccacgctagtctcaatggctaagtatgtgaggttgttgaacactggcattgcatgagaacatagaccaagcacctgaacaacaaaaagacccaaaaaaatcattaaccagctgcaaatgtaacttcaatgtttggttttataagagagaacagaacagcatactattccaagagtccgaggagataagtaaagcttcttaacattggtgacggtatgcataagcttacgcacgttaccaagattgggaaaaacatgattctttcggatgcttagtagcttgatttgtgcatcaactaagtattccaaattaactaatggaaagttgtcatgaacaaatgcagtgtaatttaagcaaacaagattcggtgtatcaaataaataaacccgtgaacacttcatcgttacattcttgaggcttgcacttgatacagtctcaatctcatgattccgatataaacaacgtacattagccaaatctaatgcctcaagcacagggcaagcagaaagtagactctgaaactgaccactatcaaaccgaattgagtcaagaatgagagtcttaagcataggtaaggccgaaatgtgtcccggccccaaattaataggacatccatttccaattttttttttttttttttttttttttttttttgaataaaatgtcaaattatatttaaaagaaaaaatatactttttacatcagcttttttgatattttgataataagagaaatagagctagatcaaaaacagagtaaatagaattgagagagcaaaaacagagtcttctttcttagaggatgctatggacgcatggcaaaccatacttgcagccccttctcgagtcgaagatcccctttctttttgattgtcgatagctggtttctaatagtcttgtctatctgtcggatgaggtttgaagctgaacgtgacttctctccgtgacgacgagaatttctctccctccaaatggaatgaatagagacttggaatgtgtacctggataagaaactttggatgcgatcaggctgagaatcagatatgtaattcaccacagcagaccattttgtggaaaatctatctttgtacacattctttgcgattgatgtccagatttcagaagaatagcagcattggaaaaacagatggtctcgtgtttccatagggctagagcaaaaaacacaggtcgtgggagtcccattgttccacgtcatcatacgatcacccgtggaaagacgattccgaattgcgagccaagcacaaaaggagaattttggcgttgcgtgagcgaaccaaactcctttatgccacgccctctgatttgatgaagttcggatatggttccatgtgtcttttgtggagaatctagccttaaagacgtcctctttccccctccagaggatggcatcctctagctctatgttccgatgctggtatttctgaagcagaatctcctcaaactcatttagaatctcaactcgatgtctcttccgtcttcttcgactccatgcttcagctagtgtcatatggcgagaaattcccatgtcaatcgctcctcgggctccagtcaggtttattaagggacctttctccgaccagttatcaaaccaaaaagatgtgttgactccattgttcacttctatcttgcagaaactttttgcaacttctctgtgttttagcaaccttctccaaatccaagaccctaacgttgagtgcgtaccaatggaccagaatgattctttcttgagtaggttcatcctagtccatttcacccacaaagaatcttgacaagatagcaaacgccaaatcagtttcagactactaaccttattcgcttctcgcaatgattgtaacccaaggcctccttccttctttggtttacaaatctcatcccaagagactttcgctttctttggatttagctccggtccagaccacaaaagagctgagctgattctattaatttcattaatacactctctgggcagcctaaaagcattcatccaaaagtttgtgatactccacaaaacagaatttattaaactcaaacgacctgcaaaagaaaggtaacgtgaagtccacattcctatccgccgacgaatttggtctattaagggagaataatctgatgttgtaagccgttttgtaactagaggtaggccaagatatcggaccgggagctttcctaccccaaaagagtacctacttgacatcaactgacgtgaatgatcggagacaccagccaaatacaatgttgtcttttccatgcaaatttttaaccctaattttgctgcaaactggttcagcaccttgactataccatcaaccgagcgaattttaccatcggtaagaatcatgagatcatctgcaaaacataaatgagttaatccaagagttttgcaccgggggtggtatccaaattctctcgcccctgctgccttatcaagcattctcgacaggacatccatacttataacaaacaaatatggagagagggagcatccttgtcgaagacctcgagcgcttcggaaatatcctgctaactccccattaacttgaatggagaaggatgccgtggacatacagagagagatccaatgaataaattccccggggaagttcattgcagccaaaacgtgagtaagaaaagaccattggagagaatcaaatgcttttgatatgtcaatcttcatagcgcatcgtgtagagatgctatctttgtggtagtcttttactagctctgttgctaataacacattttctatgagtaatctatctttaacaaaagctgattggttccccacaatgaacttaggaagaatcctcttgagtctgttcgccaaaatctttgaaatcgccttgtataagacattgcaacaggatatgggtctataatcctttatttcccgtgcttccttcttcttggggattagagctaagatagttgagtttacaccctttggcaaaaaaccctttgcaaaaaaagactgaattgctatgataacctcatcaccaataatctcccatgaagctttatagaactcacttgtataaccgtccggtcccggggatttgtcctttggcattgagaatatgacttttttaatttcttcccctgttaccacccttgtaagcaacctatgatcatcctctgaacaacgaaaaggtagcaaattttctagctcctctacacacatcccttcataatctgcagggattgtttgtaaaaaatcctgaaaatagttcactgcctccgtttggatatcttgttgactagttacaaccaacccgtcacgtgtaactatttctcttatggaattcactgcctctcgagtagttattgctcgatgaaatgttttattgtttctgtccccaacatctaaccagtgtagtttagacctctgcttcaaaaatttctcctcgattttcaaattttaattcaactagtgttctgctcatgaaattttcgattagcatgtaactatgttgacacaaattgatagacaaatccattttacatatccactgttttacacgatgtgacgcaacacctgtttgacacttgagtgagaatttcttgttgggagaatctccttgcaaagccaatactctatccacgaaatccatgaatctctgtcgatttcctttccttttcggtttattcgcagagtcatcaatctcgatacaagagacaaaagcaatgagatatcgccacctcttggagagaatcgaagtcagagcagcctcctttgtgttaaggaaggacaatatttgataaagaagctcgtctggtagactgctaacaagatccatcgtctctgaacgaaagaatagaaacaggtattaaaggttgggacttgggagggaagcaaagaaggcgaaaagtagatttagggtttgccaaagtgaagagaggaggaagtcacagagaaaaggttttagttttcctttacgtgccctacataacaaatgaaacgcagcgttttataaagtgatgcgttaaaacaaaacttgtttcattgggcccagaattaagattacaaagctacatagcccataaggcccaatactaaaaaagtcatccgaaatattttgtttcccggatttatctccgtcgacgataaaccctaaccgccattatctatttcaatgacgtcatcatcttcttcatcaaaatccaaattctcaagtccactctcagaaaaaagctgactttctccaccaatcactatgacttcctctcgccgtcttcttcttcctctcggagcatcgctcactgtaaatctctttctatctctctcatttctatttattcgcgatcggtggtgatgatgaaaatgatgatcgagttcgttgtaattacagagaggaagattttcttccgatcaaatccgaaatggatttctaagaaacttccgtggattcgccaccgtaacttcgtcggaaccggccttagccaatctggaagcgaaatatgccgtagcgttgccagaatgttcaacagtagaggacgagatcacgaagatccgtcatgaattcgagttagcgaaacagaggtttcttaatatccctgaagctattaatagtatgccgaagatgaatcctcaaggtgaggtattatttgctattgattttggttttgtgattgttcttcttagtcactgatgatgatactttgtgtagggatatatgtgaataagaatctgagattggataatatacaagtttatggatttgattatgattacactttggcacattactcttctcacttacagagtttgatctatgatcttgccaagaaacatatggttaatgaggtaaaatctcttttagccaaacttgttttagggctgagtattgttttgagaattattggttgttggttttcgcagtttagatatcctgatgtttgcactcagtttgagtatgatcctacttttccaatccgtgggttgtactatgataaactaaaaggatgcctcatgaaattggatttcttcggttcaatcgagccagatgggtgttattttggtcgtcgtaaggtattgtttaacgaatgattttgtctcctcatctactgctttgagccctcagaatatctataactctgcagcttagtaggaaggaaatagaaagcatgtatggaacgcggcacataggtcgtgatcaagcgagaggtttggtgggattgatggatttcttctgttttagcgaggtgactttttgtcaataagttgtttgtaccgtgatataatcatatgatctgatgatttggttgattgcaacatttcttttattaccatttttcaggcgtgtcttatagcagacatggtgcaatattttgttgacgccaaacttgagtttgatgcctctaacatctacaatgatgtcaatcgtgctattcaacatgtccatagaagtggattggttcatagaggaattcttgctgatcccaacagatatttgctaaaaaatgcaagtgaaagtccttcaaattatcttcacttgttatattacctttgattggtatattactgaaacagcaatttgcttctcagggtcagcttctacgtttcctgagaatgctaaaagataaaggaaagaagctttttttgctgaccaactctccgtataattttgttgatggcggaatgcgctttctaatggaggtaattcacattattgaatagatctaaaactcttttattttctcgttggaatatcactagggacaatcatttcaacactttttttattttaattagttgtccataatcttcttacggccagttccatatttttttttttttaagtggttcatgacctttattgggttgtgcttattgttcgttaggaatcttttggcttcggagattcctggcgagaactctttgatgttgtgattgctaaagcaaataaaccagaattttacacatctgagcaccctttccggttagttgtcattacgatataaccagaaacactatgttcttgtgtaaaacataatattttcttgtggaattgatcgcttaactcttttattgctattaatccttgtagttgttatgattcggagagggataatttggcatttacaaaagtggatgcatttgacccaaagaaagtttattatcatggttgtcttaaatccttccttgaaatcacaaagtggcatggccctgaggtactctttacaacaagctgatatattccattctgtaacttcatgcttttgaatgcatttaaagacagactaccacatgttttattcataggtgatttatttcggagatcacttatttagtgatctaagagggccttcaaaagctggttggcgaactgctgccataattcatgagctcgaggttagtttaccatacttgatgtctatatagctttttagttgattgtatcctcaaaagtgtttgtacatcatttaaagcccaaccttgtacactgagttctctttatgatgttatttttttggttcagcgagagatacagatacaaaatgatgatagctaccggtttgagcaggtatagtcacaccatcctcttttacttcccaagaatggctttttgcttatacgattttaacattcatgaccgtgatcgtagacatatagtagtttgagatactctaaataaagcaaagacgtatgtgttactaagtttgataagacaatttattgtgcttatattcaggccaagttccatattatccaagagttactcggtagatttcacgcgactgtatcaaacaatcagagaagtgaagcatgccaatcacttttggatgagctgaacaatgcgaggcagagagcaagagacacgatgaaacaaatgttcaacagatcgtttggagctacatttgtcacagacactggtcaagaatcagcattctcttatcacatccaccaatacgcagacgtttataccagtaaacctgagaactttctgttataccgacctgaagcctggcttcacgttccttacgatatcaagatcatgccacatcatgtcaaggtatataaacctgtgaccttaaaagagccggacattttgagttttattgattgatttgacttttgaattttggaattaaggagcttaacgaaaactcttttctacttttcttttcaggttgcttcaacccttttcaaaacctgagatagctttcattcccctaagaactgaacagatgatttcgctagacgagaaacttttcttgtatcgatgacgaatcagacgacaagaaggcttgcaattcaatctcagattcttgctgctgctgatgattcttttgcataacttaaagtggctaacacttgaaaacaaaggatgtaacaattagagattttttgttggttttagttagggattatggtgctactttgaagtttgatttctaaaaacatgaaatatctttgtagattatggtgcaagtttaataaaggcttaaaatgttttaagttgagccgtttattcataagttgcgaattcaattatgaaaaaaaaaaaaaaaaaaaaaacactacaattggagcaaagaagtagatgtatagggaatctagagcattagaatagtttagtcccaataagtaaaaaaattgctagtctcataaatattttacttataatataatatctcttaaaacggataaaatctcaatcccaaataataaatttaccccttcaacattacatgccaatttgaaaactaattaagagatttgtttttattataggtaactcaagatcttaatgatcttcttatagcccttataggaaggtccggatatttcattccaattgacatacaaattttcttcagtcaatttacctaatttaagatctataacttcagaagttggattattttctactaaaacgggaattgtttgtcttaacagaaataaataacaagattggtacataattgcaccttttttagctctacttatttttggtaaatcaattcaaggcttagatttagataaagtttaagcatgtttttctctattttgttcttctataaattactctgttttaagccaaataaaaaaacaaacacaaataccaaaaacaagtcataagaatcaaatggagttctctatcaatccttcaactctaaaggtaacgttattttaaacaatgtcatcctcctaaacatgttttgaaagtgagtttaatttgtgagaacattcaaaatatggtttaattttttcttctattcaacagatgattcggacaagtttttgtatattagtagttttggcaattagtagtttttcgatgatggaagctcgggatctagctagcaaaggaaagacaaatattgaatatatggcgttgaattgtcgaaaacataccgcagttttgacagaatttggagcagttggtgatggaaagacctcgaacacaaaagcgttcaaagaagccataaccaagcttgctccaaaggcagccgacggtggagtgcaactcattgttccaccaggaaaatggctaaccggaagtttcaacctcaccagccattttactttgttcatccaaaaaggtgcaactattcttgcttctcaggtatgaatgatttccatttttgcattatataaaactgaaattagataaatatattttgtgtaaggaattagtcatttatttacatgttttttattttgtggtttttcaaaaaataggatgaatctgaatatccagtggttgcacctttgccatcatacggacaaggaagagatgcagcaggaccaacatttgctagtctaatctctggcacaaacctaactgatgttgttatcaccggtaaggttaaccaaattaataatacaacaatttaatgaattagtagcaacagtttggtgctttaacgaccaagaatcaatgatataagatcttaagaatgtattttacgtataaagactagaattaatggaatttatttggttaggtaacaacggaacgatcaacgggcaaggaaagtactggtgggtgaagtatcgcagtggtggatttaaggggatcacaagaccttacacaatcgagatcatcttctctcaaaacgttcagatctcgaacatcacaatcatcgattcgcctgcatggaatattcatcctgtatattgcaacaatgtcatcgtcaaaggcgttaccattcttgctcctatcgattctcctaataccgatggaatcaaccctggtaagtccatatcccacgccacattatatcaaaacgctctgattttttgtttgtgtttctaatcatcatattggctttatattttcacatggcattgtcattttgttttgacacacttttttcttctttattagattcatgcaccaacacattgatagaagactgttacgtagtctcgggagacgattgcatcgccgtgaagagcggttgggatcagtttggtatcaaagtcggcatgccaactcaacaattgtctatccgacggctcacatgcatctctcccgacagcgctggaatagcactcggaagtgaaatgtccggtggaatcaaagacgttagaatcgaagacattacattacttcagacacaatccgctatccgaatcaaaaccgcggttggtcgtggtggttatgttaaggatattttcgccaggaggttcacaatgaaaacaatgaaatacgttttctggatgagcggtgcttataaccaacaccccgcttccggttttgatcccaaggctatgcccgtgattacgaatatcaactaccgtgacatgaccgcggataatgtcacgcaacctgcgaggctcgatgggttcaagaacgatcctttcacaaagatatgtatgtcgaatataaagattgatttggctgctgagccgaagaagttgttgtggaattgtacaagcatctctggagtttcgagcaaggttacacctaaaccgtgtagtttgttgccggagaaaggagcaccggtggactgtgcttttccggttgataagattcctattgaatctgttgtcctgaacaaatgctctgcttagagattgtgaacggagataatactaatttcctcataaatatatatacattgtctttttgcaatgtatattaattcccttagaagaaaatgtcccagctgttattttataaagctgatgggtacatgcaatggttttagaatacgcatacgaaattatacaatcagtttcgtggaattaaattaaagtttgaaacgacgattataagcatatgtatcgaattagagattaagctttcctagttttgtctaggattgaattcttatgcgagagatgaaaatgtgatctaagcatcgctagaccctaaacattaatggataacaaaaggatgtgtgttatatctacatggaatttttatgtcacatatcaaattttatgtatagtttaaaatgtaattaagtccttatcaaaacatatatgtttggttagtgttatactgtaattgatgttttttttacaaatatgttaaatagcgcattgcatggtttatcacattaaccaatgtttttgtgcttgatggctcgatttatgcgatgtgctaagttgtcttagaagacggatcctcggtatatattcttgtgacctaaagatatcccacgggcgacatcgcaactaattgatatgcagaatagactaatagtacaaaatttgtccgtatcacatattttttatgtcactagttactataaaaaataattaaaatacaagtcaacacataacaaaaagaattataaactaataaaatgattaaagtcgttgattagtttaaaatctgcaactaaaaatgataatatttgcaataatatttttcatttttatattccctttgttctactcgttttatctaattatgtttggttggcacaacatatatattcattttgataattctacctatctttcttttaagaacacttgtcagaattcagaacgtaagataaagctaactcacaatgtcatcgtaaatcatcttcacaccacaatcgctacctactaacttctagctactttgttgtcaacttctcatattaaccttctcttttttcactatagtatttgaatccaaattactaatttatttaaatataaactttagaaatattaaaataataatagtttaaaaataactaatactacaaaacattaaaaaaaaagaattacgtttttcaatcaattatttattattctgtttttttttccaccggtcaatggattaaccaacaacacaaagccatatagtaaaacaagaagatgagtaggttgggagcgtgcaacaatgaaatagttcacccacctttctcctatttattactacttccttctcctcacgtctctcctctacatagtaagacccaactaaatatcttcttttctctccatacactttttccagatatttctaatcaacaaaactgatgaatcaagaaaagaccatttcttgttgttgtgttcttgatgcttccacttatgttggtttctggattctcaagagattgctcactagaggttactctgttcacgcagctatccgtaaaaacggtaaaaaaatctatcaaactcttttttcaattgatttcaaggattttgagacaaatgatttgtttatctggccaaattcactaatggtgctataaagtttccaacctttaattggttccaatcaatttttgaggcaatgggttcaagttcacttatgggtacaatcaaatttagatggaatcttgttgcaagggttttttttttttctctctaatgaggatttttggtaataggggagagtgtgcttgaagagaaaatcagagacatggaagctaacgaagagagattagaggtttatgatgtggatgtgttagattaccaaagtatcctcatttctctcaacaattgtaatgctgtcttctgttgtttggataatcctgaagggtacgatgtgagtattttagtgtttctcactcaccacttctctgtaatctctctttttttttgtgtggtttggggaaattgagattttgtttatgaaatgatgtgaaattaggaggagaaggaagtggatttggaggtgagaggagctattaatgtggtggaagcatgtgcaagaacagagagtatagagaagattgtgttctcatcttcgttaactgctgcaatttggagagataacattggaactcagaaagatgttgatgagaagtgttggagtgatcttgacttctgtctcaaaaaaaaggtattttagttcaactctttttggttcattcattttcttgaaaagttcaagacatttataaacatgttggacccacagtttattcatattcatatatgatagttttgacatagaatgaacaattatttcatgtaccttttcatcaatcaatctgaaatgtattatttaaattattgttattttgaaattacaagataccatattatttgttgaacttctaaaactttgggggtagtgaatctttgttggaaaagtaaatcaaaaattgggtcttcatgtaatgtatttgacatttgtcataatgtcatgtgtttatcttagactcattttggtcaagattcaatgtaagactgccttaataaaatattaaagaggtcaaaactctaactaaatcctacctagatcatattttagaatagtacttaatttaattttgtaactactttcttaatcacagttgtggcatgctcttgcgaagacacagtccgagaaggcagcttgggcattagccatggatcgtatggtcaacatggtttcggttaacccgggcctcatcgttggaccatcagtggctcaacacaacccaagaccgaccatgtcttacctcaaaggtatatatatatattattattttttgacaatcaggtacatatatatactacattcatgtaactaataatgtaattgttctggctatgtatgtgattgtaggagctgcacaaatgtatgagaacggtgtgttagcgtacgtagatgttgaatttgtagcggatgttcacattcgagcattcgaggatacttcggcttgtggtagatacttttgcttcaaccaaattgtgaacacggaagaagaagctctcaagcttgtacaaactctatctcctttaatacctatgccaccaaggtaattattattactattattgttattatcattactactatataatttattattttatagttataatatatgatttaggcatgagaaagaaatgcaaggaagtgaagtttatgaagagagattgagaaacaagaaactaaacaagctggtggaagctggatttgcttgttaattacatgaagagagatgttataaattaaagggcaagaaaataacaaagaaattttatagtaagagttgtttgtttacttatttttttaattattgtactctcaattcagtattttatatatctatattttattttattttgaaatgaaaggaaaatatgtgttactcatagaaaagtgagtattttttttttggttttaatgtgagaaaagtgagtatttattacttgtatgtcattatttatggaatatatgatgaggctaggtagcaacaaataataagaaaatgagaaaagcattatacagttttgtactaaactacacatttgcaagctaagaaggaaataaattttgacatgtgcttgatgtaatttatgagttgtcaactttaaagtatatagctaactgttgatgaatgatttatcattaacatttttaaaaaaaattagatacaatttgaaacgtgtaataaatgatgagcatatatccatacattttgtttgtaatgggtttctgatttatccacacttcagtttctgcaagctgtgatgttagacatgataaaatcacacaaacaattcagagacatacaaaatcaggattgtgaagcaggatttaaagtatatagcttagttttttttgtatttttttttaacagcaaaatcaatattcacgttttagacatcagaaaatgaagcaggatttgcaagtttgagagttaaaagtcagtcattaacaaaatcaaaatctcaaatgcatccacgatttattaatacaacataaataatgcaatacgatccaaaagaaactacaaaaataaaatttaaggttcggtcttctcaaaaaagatcaaggttttgtcttcttggtatgtccatcatgaagtttcttctatgggacgttctttaaatttgcatgatatagatcaagatgggttgttgccatatgcgaggatgatgttgaattgcctctgctggaccaacgtttcaaggacactaaaattttaatgtctttggcaggaccggctataaaattttggggtcaaaactcaaacaaaataatttaagattattaaaaaaaaaagtggagccaattatcgtaaaataaaagtattattaacagtatattgaaattttaaagtcttgaaccacacttttgatcatatgagataatatgttttggtggtgttttaagagcaaaactaaaggagatgggaaactcgatatttggtcgatgtgggatgagtgtagacaacttcaaggctgtgaagatcccaacaccggctcttactccatttcttttcaaaactagtcgatacattctcatacacaacttattattaataggtttcagtgttttacatcaaccaattttatattaatcgtttatttatatttattttgttgtcgatgaatcggtattagaaattgagagcttgtggcatggtatatctgtacattcaagtattacagtggagaaatttttattttggactgatatattgttgttatcccgagctaaatttgtaaataggaaacacaaattgaaacttataaagtaaatcgcgagaaaaatcaattgattattagagaaatactaaacaatctgaaatgcaaatcgttcgctcaaagtaagctcacgattacacaacgatcaacatagactgctattgctacatcaccagagtatttctttgtctctctctcaacaatctagaaaagcataaagcttatgagatgtaaaggtagaaaaatttagagaaatatttatcatttttcaattaaaaatataataagagaaaaatgataatgcattatgtttaaataatatatatatataaagaaaaaaatttaaccttgtgaaatttataattttgttagtctaaatatagtatatgtagataaaatataaaattagtgagtataatagatgtgtcaccacttaccacttattacctaaattaaattcattataatgcatattggtggcagaaaaattgtatatgtaatgctgaaaaacaaaatggtatatgtaatatcattcgatagaaacaattcgaacaattggccgcattagaactacaatgacataaaaatgtcttcgtcattttaatttttttcttatcatttttgatgttgtggtgaaattttagtgtaacttttaaaatttatcgattggtgaaatcaaaaatatttgatcaattggttagacgctaaatatttgatcaattggttagaccacaacaaaaatatttaattaattggttagacgattgtaagatattacatcagattaatagcgtctagagaatacacttcgacgaaaaaggaaaatcacttaaaaaaaaaaaaaaaaatacacttcgacgaaacatgtcaatagtcatatgagttgggccttatagtttattgggcctgagtagattattgggcttaaaggagtagtaaaaaacaagaagacgctaacactagacttccaaaaatcaaaactttagggtttcagagcaaactctgtcttcttcaagccgagagcgaaaaccctaagctcaattccgattttgcaactatgagtcgttcaggtcagcctccggatcttaagaagtaagcccttgttcttatttctctctttctgtttctatatcttcgtgtttctgatttaatttttgtgcttaatctgttgtttgtttttgtttcgttcgatgcaggtacatggataagaagctccaaagtaagttcaatatcttcatcttcttttatcgatagttagggaacttcagttttgtataacacattagctgagatgtgattgcaactttattctgtgaatcgaactggatttggtattactgattttagttatagtgtctagaatcgaactcaaagtagtttttttttggtgattgtgttttgattttagcaaagagtggattttttcttgatgtgttgagattgatgaattgtatttgaaatgcagtcaagcttaatgctaaccgaatggttactggaactcttcgtgggtttgatcagttcatgaatcttgttgtggataacactgttgaggtgaacggtaacgacaaaaccgacatcgggatggtggtaagtctctcgattctgtgtccctttgtcgttaatcttctgctgctcttgactgatgttttactttggttttgggagcaggtgattagaggaaacagcattgtcactgttgaagctcttgaaccagtgggcagatcttcttagctcgttatattcattggttatgatctttttgtactaagcactagctatgagaaatcttggtggtagattcgcagttacgatgaattgattctgtaagaagtctacatgaatactcttttcttgtactaaaaagattgcaatgaacccccaccgatgaatgtgatggcttgtacttttcactcttgatacaatgctcaaacctctattagtcatcttcttagcttggtttatgcatccatagtcatctttgttttggtactaagcattagttctgaggaaacttgatggtagatttgcagttattataaattgatcaagaagtccacatcaatattcttgtgcttttactctggatccactgctttgatcttatatcttcatcccttctgttaatgcttagttgctctttttctctttttgtaatgaatgagactttaaagaagacaaaaaatgcagacaatgtaaaatgcaaagaacataaacaagtcttacatgttgagttcattgccgagaggctcccatttatcatgagcgattaggacgacatcgatttcaaccatgttgacacaaagtttactgaacttgaaacagaatgtgtatcaaaacttgaaaatgtgattgtgtcactgtcaagcacataacctaaattttacgatctttcccaaagcgccaaaagtaaagcggacaagcgaattctacgaaaccaacaagccgccactgtgagtgtctctctctcgctccctctccctccctctccctgaaagattatcatgcttcttgtggtgaagctgatggcttttccttgatttcagtacattgcaagtcttagtcaggcactggcctattgtcatggaaaatgtgtgattcacggagacatcaaacttaataatttgtgatcatgaggtatatatggttaaagtgtttttgcattgagaattcgggatattcattatttgcagcttcttgttaaggatccctcaaaacaactttccgtggattgtcaagaacgcagatccgaaagctcaattgggcctatttacaggcttaggcccatatactactagattcatcggaagcgaaacagtgagcgtcgttgtctttttcaataacctctgcttcgccggaaaaacaaacagacgacgactattgagagctaaaatccgagattaagaatggcgaatcaaggagcgaagaaacgaaaggaagagaacgccaaacacatggctaagctccgtcgtatcatcatcgcttccaatgtattttctcctctcccatctatacgtttcccagatttctacgatttttcgcgattcttcatgaattgagaattggattttgtaatttatggtcacaggctgtgtatttcgttgtgaggatgttgattttctactcaagctttacttggaaacattggatcggtttagtgataacttcgctggcttacgcgtttccttataagcagcttgatcaaatggctaaacctagtgttactgatgatggtgagcttattgatggtggatttgacatgaccactggtggaatctgcgggtacgtttgtgttaaatgaatcaacaagaaccaaaagctagcttctgtgttatggatttgcatactatgatgtttgagttatgcattttgaatcatatgatgacctttgcagatatttgcacgatgtcatctatatcacttgctttgttcagctagcttccatcatcactgggaagttttggtacacgtatcttgtggtatgcgtgtttgcttagttaataaacacaaattgatacatagaattggattgaaatgatgtaacttttgtttggtttttagattcctgcgtttggagtgtataaagcttctggtcttattcgaggattcatgtcacaaggttcagaggtaaatctcatttagttttaagtagtattagcttctttacacaatgcaaaaagctttactctgtctctgtggcgttgaactgtagggaggtgtggaagatgaaaagtctcgtaaaaagagagagaagatggagaggaaagcttcgagagggcaagtcgtcaagacgagaacaagatgaatgtgttgttatagaatacaacatgaatttggggatgagtatgttcttcaaaatatacaaatgtgttcaaaaggtaaactctctaagctttctgagtctcttttacatggacatgtctgcgtgtacaatatttactttgatggggaatagtcatcgagttgaacacagtcgattctctggagatagatgtttttttctttgaggtcgtaaccaatattatagtattgttgagccattagccctatagctgtgaattccttatattcccctccatgttctttggttggcttcactgacatacaaaagacgttaaacgtattcggttctgataatggataaaacatgcttgtggcctccatagccagctcagctccgcctgcaaaatgaaatgtcaccacagggaagcctatgagctcttcgctcactctcccatggtagcacaagaagtctctaaaccagaatctctctaattttggatccagaatggattttatttcattgtagagttctctgtaggctatatctgctagccaagtgtagagtgtgcccgagtctagtatgacccctgttcttggtcctcttcttttgaataccactggttcgatattgagttgtgtatccccaacactaatcccttctagattcatatagtagatactattctctgtctcaaattcaatgggtgttggatcgccgagaatatccgcgtcctctcccagaaccagctgattgtaaccgtagtttttgttagctaaatcaccaatgcagtaagagaatttagacccaagctgtacggcaagtgatgtgggtttggctcctaaccccaaaataccagtgaaatgactttccaactgctctccattctcgtagccacacccaaaagcaataggttgggtcacaacagtgttaccgttaggtgttgtgaaggttaaccgttctttagctagaacgccttttgacccagtgccgcttatatacacttgttcgtaaacacacttgtttgatgagccgcaatgtccgtttggtgcatacctgcaaaaacgatcatcgcaggaacactctacaaatgttgaagacaatgctggattgaagacaggatggatcatatgatctgatgagcagtgtttgcagggttgacattggatccataaaagtgagcttccagtatccatgatagttaactgcggcaccggtggctgtcctacggagaaattcacaagaaacaatgatgttttgattgcttgttccacatcaacttggaaattgctgctgcctagctctttgtcaatcgaattctgtagatacttaaaccgggctgatgaaatatctgtcaggtgtttgatatggtcttctggagtgatcggaactcgagcatttgggttgagacgggccactgattcacggtgtatcagcttcatcgccattcggttaggtttaatggattctgttactacaaagtatgatacagtgatgaagagtaagagtgaagtttggaaagaacattccattgttgttgaaacggtacagaaacatggacttgggggattacagagaccattttgtaacctcaaataaagattaagttagggtaatagcatcaagactgtgatatgaagaagaatataaaagatcaaaacacaacgaattgatgacaacaaataatatccaaaaacaaccaaagatcatgagactataaatagcaaaagtttgttggggttatgtatataaaagctatcatgtactttacatcttttgttgttttgtgttatgttttttagaaaaataaattgaacaaaaacaattagaagtacaggtcaacatatcattaagttgttggtcggtaaattttttgataataagacatgaatctcagagtttgaccaaaaattgctttcacaggacctcaaattttacaaatttggataacagaccaaaaccaacacatttaaaaaaaccttaatatatacatccaaaatattaaccattagacccagaatctcaattttttcaaaggtttgataaccatttacatgtctatatcatctcaaaaacaaaaattgaagtcatggggatattatatctgtttctttctgtgtccaagatttactaccttggaccagatagttccatggcgaatgaatctaacgcttgattatcatcttcatcttcaaatcctgaggagccaaacagatgtttggtttggttgttgccatcagtagaggtaatagtcctgtaagacatgttggcatggtagaaatgtgaatggtcatgtgaagcagcccatctctcagctaatccatctccttcaagcatctgaactacttcagacattttgggtctgtgagctggaagaaactgagtgcagagcagtgccacttgtagcatctctccaacttctattctatcgtaggttgtccccagttctcggtctactagctcctctactttcatttccttgtgtagcttcctcacctgcaaaactcaattgagttttaagactatcttttgattatacgtttgatctaaacttatagtgattgcttacccattctagcatagctcctttctggctaacagacttgccaaactcgagagctctcattcctgtgatgagctctagcaaaagtataccgaacccaaagacatcggttttctcagatgactgaccggtggagagatactcaggtgcaatgtgaccaacagttcctctaaccgcggttgtgacatgtgaatcctcgtggttgagtagctttgctagtccaaaatccccaacaactgcttcaaaatactcatctaggagaatgtttgctgccttgacatctcggtgaataatcttgggatcgcattgctcgtgtagataaaacaaccctcttgcagctccaatcgctatcttcttccttgtgttccagtccaacgctggcttagctgtaacagtaacaaaaatcagttcaagtgatttcatttttttttttactaaaagcagttatcagaaaccatttttttgactacctttgagcctagaggcgacgctgccattggacatgtaagggtaaacaagaagtctttcgctagaactcgcacaataaccgattaaccgaagcaaattcctatgaacagctaagctgatcatctcaagctcagtacgaaactgtgagttcccggaggttccattcacatctttcaatcgtttcactgcaaccactgtcccatccccgaattttcctctgtagacattaccaaacccaccagcaccaagaatactcttggaactaaaaccatccgtagctacatgaagttccctgaatgtgaagcttcttagatttcccaacccaagtaacccttcctcttgcttgtctacataaagaaccaaaacaaaatactttagacaacaaacaaaatcaaattacataaaccataagcttactcgatttgactaaccactaatgcgaagcatcgttaaccgtctttgtttctttcgataccaaatgaacccgagagagaggattacactaacagcaaagccaaggcttacaccaagtgcaactgctaatatgttggttctacgtcctacacatcccaaatggtatctaactcataagcaatggattaaacaatcgacgaaaaggcgagcaagattattgaatttaaggatggatttacctgatgaagaacgtaaagagacagaaagagggcttgcactgattgatcctgaacaaatctccggtaggctgtttttacaaatcaaagggttcccagcaacactacattcaacagtgaaaacacttaggaaaaactcaatctttgacaataacacaagagaccaaaagaaaaggtatttacttgaatgtccttgcaggaaatttaggaacaggacctctgagattgttataagacaagtctctgaaaccaaaacatcaaaaaacatgagtctttaagttaaaaagtaagaaaaaaattcaaactttatatactcacaagaaagagaggtgagggatttgagacagagaagcaggaaagggcccagataatgagttgttgttcaacctcctaatcaaatcattacacaaacgtacgaggtttaagttaatgaagacgaatctttgattgattaaaatctgaaagagagagagagacttacagatattggagattactcagctggttaacagaaccggggatttcaccggagaaccggttattggataaatccagagtctgtaatttgggaagagaacaaatctccggtgggattttaccggagatgttattgttctgtaatgaccttcaaaaatccaaaaaacaaaaacagagtttgaagaaacaaacaaaggagatacttttgtttaatgaggaaacaaacaaaataatcttacacttgtcgaagattagtgagatttccaatagacccagataaagttcctgaaagagactgacttggagctcctctggaattgggaaaaaacaaaacaaagatgaagaatttgtcaccattaatgactatgaagacaaaagcaaagaaaacttacaagccaattacgaggttgtctgaagaacaagagatcatagtccagctacaaggatcaacagaaaactcatcccagtttttgaaaacaccatgtggatcatgtaactcgttctttatgtttatcaacgcctccactgtaacaaagaatcactctaaatcaattattgggtacataaagtttgaaactttcgaatacccataagaaaaaaaagagtcttttctcgttttttgttgctttgcttaccttcagggtttctgggttcagaagagagagaacaagtaacgaagaaacatagtagtaacagaacagagaatatcttcattgttattaacttcatcaccaccatgaaaagctttagattagattaccagaaggagaaggaagaacacaaaatcattactttgttgatgttttgttgtgcccacaaaagaagagaaacagaaaagcaaaagcaaagcaacaaagcaagaaaaaaatgaatgctttttttctctttttcttgggtctattaaaaactcttttatttctgcaatgtctctcctacgcagagaagaattatgagagtgtattgttatgaatttaaggagatgataatgaacacagaaaaaaagttttgattttgtgagagagaaagctagaaaaaacagagaggagagaaagcaagagagagtgtaggtagtgttgtggtttgtggggagggagaatcaggtaggaaagctgatacggacccgtatggtggtggatgatgatactttctcttttcgagtttttttttttttttttttttgtatatgctaaatttgtgaaagtttgttttatacataaataatggtggcaatggagagaccataacggaaacaaaataaaagtataaatgaataagtccttgtattcaaaaaagaataacaaaattttatattcatttctttttttggtttttgtataaattagtgagaagtgtctcaatcaaaattatttatttatgttccgtaaaaaaaagaaaaaggaagtttaaacagagcatattctttttgtttacaatattttcagaattttcaaaactattttctaagaaattctgaaaagtataaaatgggaggaggcaagatacgaatagtattggtaacaaaatatttgaggcgtgttgaaggaaatttcacctacaaacactgatacctaataacgatataatggaaaacaaaaacaaaaaaaaaaacagattatcgactgcgacttgcgagttgcgaacatgttacttcgatgatgctagttatgattatgaatatagcaaagacacatatataacaacatgcaaagaatataacaaaaaaaaataactatgcctaaaaaatgaactcatgccaatactttaccgtataaaactgtggtatgattgattaaagtaaccaatgaaaagaatgcatttatctcataattctaatttctatgggcagattactttgaactttgcaaagctcgagtatataagctgaaaattcccctagtctgatttatcacccacaaatatgactcactgataaaggtattcttaccatcacaataacaaaaattgcaagataaaatttatagcacaactgcaccagtaaaaaagtaaaaataaaaaagaatgcatagatttgacgtgtgtagactgtaccagtatcaccacttgtaaccagtccgcagtgggtacgagactgatctacgctaacgtgcacctcttctctcttctttttgtcttttttttttcttcttattttcttccgtatttttccactgtaaaatctcgtgattgaaaatgttacctccagaggttaaaaaacgttaatttttgtgccatctaattcgataacgatacttcttttttagaaaagatattttataatacaacatatgaaaactgagataggatgagaaaatagtaagaaaaaaaggctggaatacggaaagaggcttgcttttgccttgcctgatgtggtttgatttgtgatgttacattttttctgacaagtccctctacttttgttttctttcctttttcgtctatttagttttctcgttcccactaatggccccattcttttccgttgtaacaaatgaactagtattacatttttcttattctagtcatcttttcttgtcacatttgacttttgacttttttaaaaaattaggctttgatgcatttgcacctataaagataattctcatactcatagtgaagaaaccatttttgtttaagatttgtcatttttattttgtgttgagggattatttcacactcatgtttttgtaaatattttacctgacataaatacaattttcattaaaaaaaattagtacatgtttaacacatttgcggacttaagagacttttactctacttgtttttgataatatctagtatatgttttttaagtattttaaatggatattccgaccaaatgtataaaaaatttagtttgatattgctaagctagaaatggaaattaaaattgaactacagtagttggaccaaagtccgatttgaggagatcaaaataacgtcagcagcgagatgatatgcaaccaatctccctattttccttctcatgcaggttctgtgatcatttacgcaatgcttctttgtctttttccctatatatttccaaaatattcttgagtaaaaaacactaagaatttggtaacacaaatatacgaaacttactacctggtacacattagccaatacttgttgttctttagtttgggtcaggaaaagtttacattagaaaagagaaaaaaaagtttagaacatctaaaagaaagtccttgatatttattttttctttgtatcaagattgatttattttttaccattatttttaattaaaagttacaagaaaataatatcaattatcatcaatagtaacctatcatagaatcatcggattctaattgctgtaatttacaaccattatttaagaagcagcatcacttttctcaataatttgcgcacaaaaaaattaaagtggccaaattaaaacgttgatatttgcctttacgaaaaaagttgatgtttgcctctcatttttttgttgtaaagcatgttgatattactttttgaatcgttttaaaaagattgttataatacatttctcgtgggccaatattctcataaacacaaattacaccaataatatatgcttcaaactcttgtgctacacatttgtagcttattgtgttcgttccccgaacttgttccttctgctttaaattgaataaatactcttcttctgcaaaaattcgatgaaaagaaaaatcgaatctagcacattcgaagttaatgggaaacaatactttaattcgatccattattctattaccattagtactatcacttatacgaacatatatgttttgtttcacgtcactatctttgatttagtggcatgtttaaacatatagaattcaccgctgatataatttatcactaattagaaaattaattatctctataaaaaatacattatatgggatgttaattaaacctggattagtggtatatgcgacgtacatcctatagaatatcagtttgacaacttagtgagagactgatcaattgatataagttatcgatgcaaaaaatttaagttgatataattgatttgatgtcacatttgatacagatggtttatcttctatatatgtagacttttctcacactaacgagtttgaaagtacaaaatataaaatctggaaaattagcaacataacatactgatttgaaagttttttaagagaactttatgaagacatcttaaatttacgaaggtttcctaggcatcttcatagaaacgattcgttagtttatttgatctaaataacctattttctatttgatctaaaagtttataaagcttaaaacatattttgattcgaacaactataacttttaaatcttgagatatcaaaagacttctataatgaaataaaaagactgaacatgacattcattgtagctttttgtttttaatgcaaatatttcatcgtagctttttttttcttaacaaaacaaaacattcataataactagtaacgagtaacaacgagcaagagattcgcatttctcacactcacactcgcaaaaacaaaagataaaggggaggaaaaagcttaaaatctatcatatacaaaaagaaaagaaagatttgcctataaaaatcaacaaaaacccatcaaatgaatgtttttttttatagaacttcgtgaagaagaacacaccccacaagcaagcaaccctcgcgttttggctttggaaaactgaaaaccccacaaaaaaaaatttcaaagtaaaggaaagtacatgcaaaagtaaaaagtaaaagtaaaaagtgtaaaagtaaaaacaaaatcaaaaagtgtaacaagaggcggcaaatcttcgtcggagtgcgtttattctttctgcgattttccccattgatcatgtggacgacctcatccttccaactccctttatattctgccccaaattcattttatttgacatttttttttgcctcatctcatataccatgtatatgttatacaattacatatctactatacaacatacttttgtaggtttacttcgtaatagcagaaaataatatattagtatatgccttaatacttttgaaaagtgatacatcaccaaattaagtgtattccaattttgtaaaatcgagagataaatttaaaatattggaaaataaggccgaaaatagtaactgtaatggctcgactgagcaggcgaattacgaacatggtaccattatgttcgcatgtgccaacgtaaaggatataacatgtttggtaatggagattacattattatcataaagaaatatcgatctgtctagtttattttatacgtgatattaaagttggaaagaatctgggcttaatatactaaatgcctaaatacttttgaaaagtaatatatcaccaaattcagtgtattccaattttgtaaaatcgaagtttaaaatattggaaaataaggccgaaaataataactgtaatggcccgactgagcaggcgaattacgaacatggtaccattaggccatctccattggtgagatacttcaaaagtttctcaaaatataataataataataatttattatgatttagtttctatccaattataaacacacacatatacacatagtctctcaatcattactttaaagtttctctgcagagaaactattctcaatctctctcttatctctctcatactttattattattttatattttttagtcaatgaaaaactatgtgagagactattgatggagatgctcttatgtttgcatgtgccaacgtaaaggatatggcatgtttggtaactgagattacattattttcataatgaaatatcgatatgcctagtttattttatacgtgatattaaagttggaaagaatctgggcttaatatactaagtttgaaagttcaaacccacaatcactaattcaaattaagaagaaaaaaaaacgatttctttgttgtccaaactacaaaagaaattccaaaacgcacacattgttgacttgaacaaataaactagcaagtaacgagagcattcgaattttattagtgggtttataacatgttgtaggtaagcttttgagcctactttctctctttttatttccatctaaatttatggtatccaaataagattcaattctttattgcataactgcgaagtgatttggaagtattttaccattaaaaaaaaatgctgtacagtctattaattatgggttttaaccttagtggtctaaaatcggattgggttgtcctactcataacctaagatagcatgaaacacatggtgttagttgtggtgatggaactagaattcaatagtataattacaagaaaacaagatgatatcctaccaattttcctaagaaaattttggtagcaaaaatagatagattcgcatgcgtaagaggacactaaaattttagtcattaactacttggtcggctttgcttacgcaatactgtagtaaggagaatgccttgcccgccaaaaccattttgttaaagcttaattttatgatatattatacgtggttatattatgtggaactgtccactggaggagatatccgtagagtggatctcacgatcaaagaattatggaacaccagaatttgccatggggtcaacaatggttatataacagccactattaataagatcttagtgtcaaattgaataaataaataaaccaaacgttacagaaaacataaacaaatagaccgtaagggattcacatgaatggtcaaccccatcacctttataaatatatacacacttcatttttctcttctccattcttctctcaactctttgtctccctctctctttctctctagtaatttacgatcaaatggctgaacaaaagaagtacctattgtttctagcgacaccggactcggagtttgcgaagaagacatatggaggataccataatgtgtttgtttcactgcttggcgatgaaggagagcaatgggactcttttagagtcgtggacggcgagtttccagaagagaaggatcttgagaaatacgaaggatttgtaatcagtggtagctctcatgatgcctttcaagacactgattggatcttaaagctctgtgatatcatcaagaaactcgatgacatgaacaagaaagtcctcggtatttgctttggccaccaggtaatttaattctcatcacatatataacatttgttttttctcttatgttcatagattggaaatttagattaaaacccaatttgtaatgaatatttttgtaatgaatatttgtgtacattaattgttaaataccataccagtttagggttaaagaaattaacgaaaccttcctcaattaatgtataagtttatcaacttttgaagtacatgtgtgtgtgtgtgttttcatgctcatggtttggaagtttagatcaacctaatttataaatgaaatttgtgtataatctatttttaataattatgctcttttacgttcagagaaactaaaatgatttttttcattttatgaatattgtttatatatatatatatacatatatacatattgtatcgtgattggattatttttaatgcatacgtaggaatataatcttgtatatagttgtgagtaaaaaaaattagatagcttctttgaatggttcttgtatggatttttcttcgaacgtgtacacaaatgatcacgtaagaattatttttctttatataaattttataaaattagatacagctacttggaaggttatttattcaatctaacagtacagttgacaatttgatatggaacctcacatttcgtataagtattaactaaagttaacttattctaatttaagaacacaattattggataatatatgtccagctaatagctagagcgaagggaggcaaagtagcgagagcaaggaaaggaccagagctttgccttggaaacataaccatcgtgaaagaggcagtgatgccggaaaattacttcggcgaagaagttccagcgaatctgaggatcataaaatgtcatcaggatgaagttttggagcttccggaaaatgcaaaactgttagcatattcaagcatgtacgaggtagagatgtattcaatcaaagataacttcctttgcattcagggacatcctgagtataaccgtgacatcttgttcgatatcattgatcgtgttcttgccggaggccacattaaggtttttttctaactctccctttgtagaatatccatttatttataatttgtatcctaaaacaattgctacttacctaattaacttaatgtgcagcaaaactttgccgaaacgtcaaaggcaacaatggaaaagaatgaagcagacaggaagttttggcagaaaatttgcaaaaacttcctcaaacgtcaaccctccttattagtttgactcacaaatcttcatcacacttgtttaatatatattccaactccatgtatcaacgttacaatattatttgtaatgtatgacatattgatgtgttgtatccataatataattaaataaaagctttaccctcactaacccagaagcttctttatgctccaataagttttactaatgccttgatagaaatgagcctcctttgcgccattaattagtgggagtaatcgtatgttcggattctggtattttgttatgtttcatgggcttttaactcaaaattagtaatttgttccatttccattaattatattcaagtcctttttcatcttactcaaaattaattggtcattagtcaaatgctccattcccattatattcaagtcctttctcatttttccaatgtaaaatatttcttcacattcaattgtcttagttatttggagtaagttattaagttttcatataaactaaatgtgaatatatatatatatatataaacaagtttgaatgtgtaccgttttcaacattccatattttataaacaatatttattataaaattatgaaaatattagaaaacaagtaagtaatgcactaacaccttatgctccgattaatcgacataggcgttaaacccttatcatatgcctagttacggcctaagagcacgtccaacgtgggtctctttatacaggctcattcacttaaaaataacaaaaatatttaaaaagtaaaagagggatgaaagagagtctctgaaagtcctcatttaagggacgttcccacaaacatatttgcacgtgtaatcttatcaatggtcaatttatattaaaaaactaaaatataattaaaataataaaatattattactttttacttttttagggattttgatagtcccaaccatggtacatgctctaagagcatccttatcaatgagttcttaagaacatgaaattttttcttaaaatattatataaaacaaaataagaattaaagatataagaaagggttcttaagagaggaaaatggtttttagataagagatatttggtacactttttcttcttgttaagagcctactaatatttagttattattttatatatcaaaatgttaagaattttgtctaagaacccaccaataaggatggtctaacgatttttttcttcaaacaattgatttaaaacagtgtattaaaacccaatccaggatcactacgagtctacaagtcaattgaataatagattttcaattaaataaaaaataatccatattagttattttttttgagcgacataatgaaatatttattaaaaaattacaacaaacataatttatacaatatattatataaatttaaagaaaattttaaatttcaattcatattttaaacacgaatagtttaaccaataatattatatcatatattttgatattgaatccgaacttgattagtaggattatgaggcttatcgtatcagctgtgatttgcggtcggatctgaatacattgatttaaaaaggtgggaccgtaatttttatagtcagtttatttttatttatcttatgtgaattttgtgtgaaactgtattttaatttatgctgatatttgtttttccttttttgcgaaatttaaatacattagctgtattattatttttgtttctaattctgcaactatccctatgtggctagcttgcctataaaacttttgttgatttctataaaaactttgactggaatttatcattaagccataaaattatttgtgctctttatgtcattaaattctcatagtcaaatctattgtggtcaaatagtaaaaactctaaaaatacaagtaaataataaaatataggaaaaatctgtcttttctttatctattatcttatcaaaatatccaataatattagagaatataataatcgaattaaaacaagaaaaaaatccacctagttaatttgttacttacaaatcacaacagatacgcaacaaagactctccagttggcttctgttacgatctctggccgtctttaaaacacacaaaaccttttcatgtaaaaacaacaacaacaacaacaacaaaaatggttaatgagcaaaagagatttgctttgtttcttgctacgagcgattcaacgttcgtgaagaaagcgtatggaggctatttcaacgtgtttgtttcgacttttggtgaagatggtgagcaatgggatctgtttcgagtgatcgacggcgagtttcctgacgataaggatctggataagtacgatggttttgttattagtggaagccttaacgatgcttttggtgatgatgattggatcgttaagctttgttctctttgccaaaagcttgacgacatgaagaagaaggttcttggtatctgctttggccaccaggtttaatctgatccgtttagatttatgttttgattcttatccgttggatcgtacttgattaggggttttcgaaaaaaccatttgctcaaataatcacttagaaatgatcaaaaccatagaagataatttggttgatgtgaatctgagtgtgttgagaaatctagtgactcgtaaaagtgtgttataaatattaaggtcttgattgtttgtttgtgtttacatttacatttgatttactaatgaatccaaaaccttaatcattttaaacaaaatatctttgttaacaataatgttttatgaaaaactgcaaccataacatgtagcttagtccgatagtatcatcgttgattttgatgttggtttccatgtcttaaggttgatattgtctgagtaaattttaagttctaggcattgtggattctttattggctagaatctgaaacggatttccaaaacgatcttgaatatgaaaaaaccaatgtgcaacagtttgattagaaagattcttgatgaatgatctgttttctctctgttgttgaaaccagatactaagtagaatcaaaggagggaaagtcggaagggcgagtagaggtttggatatgggactaagaagcataacaatggttacagacgcggtgaagccaggtggttactttggaagccagattccgaaatcactagccattataaaatgccatcaagatgaagttcttgaactccctgaatcagccacattgcttgcttattcagacaaatacaacgttgagatgtgttcgtatggaaaccacttgctaggcatccaaggccatcctgagtacaacaaagagattcttttcgagatcattgatcgtgtcgtcaatttgaagttgatggaggtttgcttcttatatctttattccatcgtctttagtgttacttgttggaagctttcttgatgtttctttgtttgttttctcagcaagattttgcggataaggcgaaggcaacgatggaaaacgcggaaccagatcggaagcaatggcagactctctgcaaaaactttctcaaaggaagatccgagcaagtttaaacaatgaacaaaacctgtagaattggtttgaaaatcttaaaaaacatttctatgtaataacaagattaagaacgatcacaaataatcatttatattacagtaagtgtttaaacaacaacaaaaaaatttggagcattcttagagattgtgtacaagttaaaaagaaaaagaattcttgcgtatgcgatattggatcagtgatcttcagcagagaaatctggttctggaggtttctgaaatttcaccaattctttagtagatgacaacaacaatgttgatttcgcggtccggttcttgtgaacgctacgaagtgcatttgccgcaaactttgaagccaagaacgttgctcttatgctataaggacttcctcctgctataactgatgctgctgccgcttcttcttcttcctcttcttttctaagttgctccaatttcttcctctttatgtaccgtcgccatgctgcttgcatgaagcaagcggcccaagtcctccattgctgtgaatagaatctgaacgtgtgttgtacttgtctgctatggagtctcctgaactggcttgccacgaatttcagctcatcggctatcagagcgaaagcttccacttcggttaaggccttcacggttcttgtagaggaagggaggttagaaccggatttgggatcaagcgcccatgtcaaaagctcgtcaccgcagaaatctccttctttaagtaaactccggttgtagaatccgcttctaccgccatcagtggttacactttcgagcctaccacggataatgaagagcatctcgttgactggatctccctcacgaaccaagtacgacttctcagtgaacagacatggcttaagcctctcacagattgcatctaacagcctctcatccatattctcaaacaatggaacctttgccataggaaaaagaaaacggatttaaaaagacttttacgaagatgttaaatcgagtgaattacgaaaagaaacttactcttcggactaacgcgagacagagatgacgtttgatatctcttctaagatcctttgggagattctgaacaagattctcttcatcaactccacgcgtctccaaccacttgtactggtcatatcgtctaacccgttcccgcagttctggtggaagcattcgatgatgcatccactgttctgagtcacgtctttttactcgcatttcttctaaccgaatggtaagcgattgaagataagtctgtcaagaatttatcaaaaacatcacatcgtttttcatactcactagcgataacaagtgtataaacacaaaaaacactaacaaggtcccttatttacctgcatgtttccaatgagaagtgcaaatagtagaagtccagcaatagcaagtgttatagagaatataacctctccaggatatgtgctggtttcaagcccttgaccaagtgtactgcaaaaggattatcgaggttactaatacgaaagagactcatcgcattgacaatataacaaaataaaatcctttgtattacctaagattctgtagtccccaccacaaacagaagaagtacttagagacaaagttcttagacgagacgatgccagaggagagtgctcttaagtagattccaaaatcaaaaggaggttcttcatcttcggggacattgacagggcactttagttgaagatacgaaactttaatattgtcccaagcagcataacctttcatattttggttaccacaaaacaagaagtttctagtacagttctggttattgtggcaagccttactccaacagtcgttattgcgttctaaagcaagcaaataccacaaagccccaacaatctgcatacacatgaacttatgagaacataaaaacggatacagtatggtacaagaaaattggatgctaacatgacttgcgagcatgtaaagcaacaagtagtacgctgcacccgcccacgcagtttcagcgaataccccggcagttctcttcagttctgaacttaaaggatacattcgaagaaaccgcggaatatactgaactaaaacgatatatctaagtgcttgttttgtcgccagtacattcgcacccctcgaagtatagaggaatctccaaactataatctgaataaaatagacaaaaatgaatatcaaccaacaaaatcttgaaatgtagagatgtttgatgtcacattctgttgttatacctgtggaaccggaagaacagaaagtaaatcaatgatgaaatactgttgcagataccgcttagctatctgcgccgggtctataacaagctctccgcggccaaaaacccgtgacgagggagcaacataagctgttctaaaccgtagagccatatgaaagagataaaacgaatctataactgtccttattgtagttactataatagccagtttccgatctataccaacacatttcgctttatcattaatgaaaggaagatacaagaagagaggatcaacggatactgcgagtatacacgaagcgacgaacaacttgttgcagagtaaaagaaacttgtcttgtggatcaaatatcttcttctctgatacttcaagatcttctggaaacacagcgcgcgaaacaccgagtccaatcgatcgacctatagaccaaagcccctctgatccttttctaaaccctttcttaaaagatccagatgatgctttgcttccttgagcaaaacgtttaggtcctccttgtatattcaatgtgcatttgtttagacccgtttcggaactttgcgagtaccttgagtccatactatctaacctatttgaattcaggaatactcaaaaagcttaatactattcatacaatttcatgagattcaaaaattgttatatatacctcacaaagttctcgcgttggccactgatgacttgagatttgactccttttgggccacaagtatcgaacatactcttttaactcatgaatcctaaaaaaactgcttttgagacaaattatcatcaagaagagaatcactagcgaacccttttcagctataattttaggagttacctaattggaactaaggaggagtttttctttttttgcaaatcaaagcgattgggttctgaaattaggttacttgagctaatttatcatttcaccagattcataaaagatgataaatttaaaacccagaaacaaaaatcgaaactttagctacacaaaacgaaccaaactcatttctaagatagcctaaatcgaatccaaagtcaaacaattgcaaactctaatcaagctcagcgactgagatcaggaggaacatgaagaagaagaagaacttacagttacagtcgaatctgacggcgaagaagaaacggaagaagaagagcacaaattgttaaaaaacgggcagagaagaaagtgaaggtgtcttcttctgtcttgtgtccaaaaaattgactttcttcttcttgctgtccgagtcgggtcccacccgcttcctgtgctgtctccttttaaatcattacatgtaagaaatatagggatatactacaaactataattttcactgcttctatattttactttgattcaatatctactacttaaaaaaataaattatatgtataattaggttgtcccacgccatgcatggaattaaataatttgtttacgtatcaaaatgttatattatggttctttgtccacaaaaaaaatgtgatactatggttgataatagatgctataagagagcatctccaacgcagggttttaatgcaatatttgttgggctctcttgataatttgaattacaaataaatcaaaattgaattaaactgagagaggcgtttctctgaagagagtttttgagggaacgagagaggcgacaggtgtcgctaattgatttgttgtgaagttttaacaaaacaaaaaaaaagtagcgtttcatttttttgttcgaaagagataatcactttctttctctgtctctctctctcgtgataatgaaaccggcggtgaactcttgatttccgattagttgacgccgtgattgtgtgtaattgtgttatctgaggcttctagacgccggattcatcaaaacgaaagacggtgaagaccatcggcggaagagaaacccaatcggagaatagcaaatctgatttggagagtaatcgttgccgaagtctccaaattaggtatgaatcaagccattcttgcttgtatatcgtgattacatgttgtatttggtggtttaatctttcaattcaacataagataaaaattcaggtaaaacaattgtaaaaccaatgttgaatattgaatttaagattgatgaatactggttttgactctacctgtttgttttttccgaacttggttttgcggatctgacatttcccgtagtgtcttgttcaggtgaacaaaaaaggtacccagatgctctcaggtttacttggtattggagttcatgagaatattctttggccagaattcttagtttttgttttttgctttgtatttattcagttggcttataactgtgaataatttaatagaattacgcttatgctctgcagatatatactttcaagtaaaggaaaatgaagacataatgcagactgttgttgcctcggataataattatgtggtatgttgtcttttcaggtatattatcttattacatcatgaacctttgtagatcattcattaaaaactggatgcattaagtcattttaagcctagctttcttctggaacggtagctaaagctgctttcttattactcttgctttttctttttttttggctaatcttccaatattctgaatctaaagcgtacataagcatgcttcaatagtagtcatgtaggttggtgccactgctttatatatatatatatatatatccttgtgtatatgtctatgtgtttctttagtttaaatgattctgctgcatggtgtagtctttacagttgctattgttgttttctctattcatttgaaaagagataaagatgtgataagttacataagtaatagtcggttttgatacaatggagatgatcaaggtccaaggacatggagctgagcattccatctcgtattggttttggaaattgaagaaatcgaagatggtgaaagtaaagtcgaggatggaaacaagggcgatgaggatgaaggagaagacacaagttattgaaaacaagatcattcatttttttttcagagaactcttttaagaaaactttaacaaaaagtaaaacacaaagctctcttgttaattttttggaaatttaatcataaaaaaatggagagagtccttggagaggctctctccactggaggtgctctgatactcttattatatttaacattcgttttattccaataactctaacctacatgagctgtaatctgtagatataatccgaattctgaaaatgaagaaagctacgtgaatcaataaatgtactccgattaatgtattctgcaagagtcaagacaagtgaaggatttcaccttgaaatcaaaacattcatcacccaattgaataaataatgagacatcaatataaaatatttaggtaccaagaagatttgacattgctaggaaactaatttttttttatatttgtagaataaattgttgacagaaacaaaagaattgtaaattaaattataagtaatgtcagatatgacatattgtaaattcagataataattattctgcaaaacatagattttggatgcataacatgaaatttaaacttcaagaacttttgttaaaagccttaagcgaaagcaagcccaatgacagcaacaagagtcgaggcccaaaagatgccatttccagcaaccaacccaacagcactgctcttggccggagctggcgccggagccatcgtagaagtagatgactttggagaaggagtgggtggagctggggctggagcagccggagtagtagatggctttggaggaagagtgggcgtaacagcggctggtcctggctttgggtggttaggtgactgaaccacgacagtcactttctcacctttagcacagttaccactcggagctccacttatgaagtagtaaggccctgagacgtcgagtttcactgttgtgtatccgtctttgtgttcttccaaaggcttctgtgtgttgcatttttcgtagttttcttttgttacttgtaacaccgaatcgatctttgaatcgtatttaaacactgtcacatgcaaaaacaatccttagcttactatcttatgcattcgtatatatgaaaaaataattatatatcttaaatgtgttttaagttccttgaatatatctaaatgatttggattattgacatatcaaataaccaaacccaactcaagacttctgatattcaaaccagaagcctttgcagactaaaagtgtatccaacaataactaacatccggatcttgaccatcatgacgaaactatggtagcatcaattttttttttaaaatgtcaacctatgttaaattttattaacatgctaaaagattaagacccatttaatcataatggaattttgtggaaaaccatggtaataatgtcacttgataaaactagctagcatgtagatcaaaatattcaaaaccaattaaaaaacgtcaaaagtataatttagaagaaagaattagatacgaacaaagagcgtctccgacttggaaccggacggactcagcccaatggttgagagagtggttgggagattctggaaccttccatgcgtctaatgatcctcccacattaatgattctagcctcaccaaagtggtagaatgttgtaaataaaagaaacactacggacacaatgctaatcaaagacaccatttttttctctactcaaacaaaacttgcaaccacttgcctagaattctttttctctttagacgtgaaaaagtttggccgttatggtttggagcttaaatgggttttatataaggtttaataaagaggttgggaggatccgaaccagatttggggtcaaatttggtcttgtagaaatgtaatgtaatcttcccaattagccaagtaattgtcagtttcattatcagttggattatattcttctttttattaaaaaaaaaatatactctttttcttaattcgaaagcaaatgaagattatatggttgatctatatatcatatctttgtagtaaattcttgtattttggaactaaatcaggttttcaatacaaaataatttttgacatgtagaacaattaaacttgaagtgtactcagtaaatctaatacaataaattaaggttctcctcaaagctcatttcaccaaaatctgacatttgccacctagacaattgacacgtgtcttcttttccctacctctcatctttttttttccttccttacctttctaagaaactaaattttaatattaaaaactaagatataccatgatcattttaaattagataaaattatttaattatttatctaatatagaaaaccattttccaatactttttctaagatttatttctatcagttgaagtaagatataaacaccaaattactaaaatatttttttccaaaaacaactcagtgatttatttctaatttatacagttttccttgttactactaatagcaaaaaaaaaattcttttgtcaactaatagcaattaatagtatacaaagtttggacttcatgtaagaatcttacctaaggatatgaaaatcttgatttcgaatagtgaaactggatcatagtgtacaacacaattaaaccgggtggatccaataaaataatttcggttcatacgggataagcaaataatttttaatcatatatattcacacaatacaaaactaaagacactagatccaaatactattttagtaaatattagtgaggatgtcccaatagcaacaaattattaaaatgataattgcgaaagaaaaccactattgttattttaatatttcacattatttaaaattatcagttcaatggccattaagttcttgtgtttcttaatctacatttatcactgttttcattgaaagatatatatagttttccttgatgctaactaatggagtctataattgtaataatgatacgacacattattcatatctttggtacattagaaattacaaaaatctaaactggtcaaaacactaagaaaaaggtagagaggtcatcattaagtaatgaatatgactcaacgaaacacacattacatgatagcctccaaaaccccatccatccatccctatgtctctcccacacatgacacaaaatatatatacatatacatatatttgtataaaaatgagtggtcgtaacaagtcattcttcattctattggtctaacaaagcccattgacgaaaaagagagacaatattgaaagagagagaaaacgagaaatggcaagaacccacttactctttcttctatttgtgctcttatcattagcaacatcatcaacatcaacaaaagagcaagaggaggacaggatcaaagcactaccagggcaaccaaaagtaggattctcacaattttcgggttacgtgacagtgaacgagtcacatggccgatcactcttctactggctcaccgagtcatcttctcattctcctcacaccaaaccacttcttctttggctcaatggaggttggattttttttctccccactttccctcgtatatttatatttataccaaaatatgtttcgaacactgagtccatatccaaatgtatcatagtattcaaactcgatctggtatagaatgacaaaaatactatttttggcaaatcaaaaacaattttattctgataattctttaaccaactaaaccaaaaaaaaaaaacaaaaaaaaaaacaaagagtaccaagtggttcttagcttagtgaaagtccggaagctatcggtcaaaaagaaccttgtgtccttaattcgataatattttggaaagattttcggcacctatgaactccggccacaactcatcaatttgccaaaaacaatgaaaataaaaattactttctctataattgatagttatagagtaattaaataaaacataagagacgtaactatcaaaacaaagacaccagagaagtttgtgataccaaatatatagaatttaaaacaatataagaaatcattagaatgtgtcactaagaaatattacattcttagtatagcttatgtttttgcaatacgtaaaaatgaaaataattcttatcaacacaaacatattcctaaatcctcgttaaaaaacatatgtaccctagtgatttgtgttagtgtaattgttatgtcatcacttcaattcaaatcggcgatgtactgaaataaaatcgtcatcaaataaaaaatggaagacgtcaaatctcattaacatgttacatgattattcttaaatagactaactaaaagtaaaatatcaaaaatacctatatcaacactttatgttttatcattatttaaagcaaatcaatgtccaccaaaacagcatcaacaatccaatatgactctaataagtgaaacatgcaattgttgttataaaaacaaacaaaaagaaacatgcacttttttttttagtttttatgttgttttatatatgaaaaattccaatcttgcgtgcatttgagcaaatgtccacttcctcactaaaataatccgtacggaataataattggaatatgctcttcggctacaaaacctcatcattcaaagaatgtgcatgacaagttgacaacgacatgaaaacatggatatactatctttttcgtatatactaaaatttaaacggacagaaaactaaagcaaatgtagccaacctttatattacttgctaaaccaatagtaataaagaaaaaacaagaacaattaaattggacaatagtttatttgactaataaaatgaagttattagtcaaatcataggctatgatcattaaaaagaataattggtgatccaaagcggttgcttagcctgtttgtcctttaggataggcctggaaacatgcctatatactcttgagattagttggaaattttggcaaagctagaataagttaagattggggtaaagaaaaactaaattaaggaagaacataaatagtttcttctaatcattgaaataataataaaaagaattattaactaaacaaaagccggcatgatgtatgaaaacttaaaagtagagtcatttgatcaaagatccttgttacatataatccattctcatctcaggaccacaaaacaaagaaagcaaaggcatgattggccaaacatctatataagtatatctctaaccctctgatcactttcagacatcaacttttcaattatttttctttctcttcttgacatttgataagaatgcatgacagaaacatacatatatggccgtcttttgataaaccaattacatcagtcgagtacatatcaaaatgagacagaaaattgaaaacatacaattgcttctttatccaaaataatgttacatgtatataataaaaatatttgaccttttaagttatattgtatttattaatgataaaagaaaatttataagggattctatatgaaaaacaaataacaatttttgtgtatatatgatcatacatgtaattaaactatgcaggaccaggctgctcgtcgattgcttatggagcttcggaggaaattggaccatttcggatcagcaaaaccggttgcaatctttatctcaacaacttttcttggaacacaggtactcactaagttaattttcgacatgcttcaagttagttctttatttgtggagtcactatgtttcacaactccaactatcaaaattagttgtatggaaaactgtttctatatacttaatactttgtaattaagttatataacatttttgaatgtgtaataacagaggcaaaccttttatttcttgaatcgcctgttggtgttggattttcatatactaacacaagctcggattttgaagaatccggagacgaacgtacaggtcagatttttttcatctaaatatatatatataaaaagaaatattctatctctcaagattctacataaaaaatatgaaaagatcaactctaatatagaaattcaattattcttcgcatatagtaacaacctctagtaccatccaaatggatattaccgatgaaccagaagatttattattatcttaagaaatatgtttagaccccacatcaataatctgatggcaccaaactcataattccttagtgtcaatttgttaacctcatggcctatgttagcaatcgattttctatggatttgactactaaaatttcacatgaagattataattctcaatatgagtcttgacattaaccagcattgcaaatatacataagactataaaatttaataattacaattcagttcttttttgtttttgttctttttaagagaaactaattaattaatagtgtaattgtgtatgcagctcaggaaaatttgatatttcttataagttggatgtcaagatttcctcagtaccggtatagagatttctacattgttggtgaaagctacgccggtatgtcaccatgcatatatgatatataacaataaaatacatactcttagagcaaattagattttatatggtttaatggtttttagttaatcttgtttaacaaaaaacaaaccaagattcatgtctttcttacctgatttaaccaaaactgtcaatatgtatatattaacgtctacttttacaggtcattatgttcctcagctcgcccaaaaaattcatgagtacaacaacgcctacaaaaatccagtaatcaatcttaaaggtttcatggtaagaactaagtaaggtctatttatcacatttccaaaactattactccatattcatatatgtccctaatatctccttgaaggttggtaacccagagatggacaaaaacaacgacagactagggacgataacgtattggtggtctcacgcgatgatctcggacgcttcctacaatcgcatcctcaaaaactgtgattttacagcggatagattctccaaagaatgcgattccgccatttatgtcgctgctgccgactttggcgacatcgatcagtacagcatctacacacccaagtgtgtaccaccacaagaccaaacgaaccagaccaagtttgagcagatgatgcaaatgcacacaactaaaaggtttttagaagatcagtatgacccttgtaccgaaaactatgccgagatatattataaccgtcctgaggtacaacgagctatgcatgctaaccacactgccattccatataagtggactgcttgcaggtattcccactgctcatctacattgaaactcttgaaccactgttattcatcacatgttcataactttattctaacgtatactacaagaaactcttgaaccaaattgtaaccaaactaacgactctaggtcaaacttcagttataaaattattaaaaaccaggcaattttttttgttctctctgtttgttacagtgactctgtctttaataactggaattggagagattccgacaattcaatgttaccgatatataaggaactcattgctgctggtctaagaatctgggtctacaggtacactatgtttcagtatattaacctagacacctagttataaaagatcatgatagcaacacatattttggtcattaaatcacatttctccatgcagtggtgatacagattcggtaattccagtgacagcgactcgatattcccttggcaaactgaatcttcgagtgaaaactcgctggtacccttggtactccggaaaccaggtaggaggacgaacagaagtatacgaggggcttacctttgtgacggtaagaggggcggggcacgaggtgccattcttccaaccgcaaagtgcgcttattcttttaagatcattcttggctggaaatgagctttcaagatcttattagtgaatagtgacccaacatttgtagctccactggtgtactaaggcaccttcaaaacgaagtgttcctcaaggtacgaatctgaatgatgttggggaggtgattaatgttggcaactgactgaaaaatttattggccaatgggctgaatcctctttttttaagaaacaaaattcaaaacccttacaaaaaggagaaaacagagtccttgatttctttagggttctttaggacttctttaggccaatatttttttttttcataatctttcatttcaatcagcaaatccctaaatgtggtctatgatggcttctgacaattaattttactgtcaaagctacaattggtctacccgaagcatctaatggtagctttgaccgtaaaattaagagagaacatacgactaacaaagttttaaaagttatcatgcgatcaattgtcaaaagagagggtccacattgtgtaaaagaaaccgatatctttcttacatgcatatatataaaagtaaatttattagtggtaccaacacatcctcctccattccaacccattgaagaaaaagcagagactatagtgaaagacagagaaatggcaagaatccacttaatcattatactactagtgatttcatcgacatcatcatcatcatcatcattaagagagcaagaggaggacatgatcaaggcacttccagggcaaccgcaagtaggattctcacagttttcgggttatgtgactgtgaacgagtcacatggtcgatcacttttctactggcttacagagtccccttcttcttctcacaccaaaccacttcttctttggctcaatggaggttagattacattctttaattcttttgtctccccacttccgctcatatatgtgcacacatgcatttctcttttatatcttcataataactccaaattaaactatctgaaaaaacgccaaaaataaataaataataataatctcaatttaatataatttgcagaaaatatcgatagatttttgcaacaaaatttgtaaaacgttaaggaaatgtaaacgtaaacaattgcaataaaacaagtcgctgttctatgctcggtcctagtaatagcataaaacggtaatggttattcattggtcagagagcgagtaattatttttgtcctgctttaacttattaattaaccaatccccaattggttacaatatggtacaccctttaccaatgataagggaatatcaataatcttaacgattagactcgaaaaaaaaaagagaaaaaaaacaaacattatttttgtatatacctacataaaatattaatcaaaagaaaaagaaaagaaagtgaaatccactaacattacttttttgaatctattaagtttttaaaccaacaaaacctaccctgagtttcatattatgtaatcgtaaaaatttcaatcattaatataaatgtggatgaaacaaatcggtgtccaccaaaagaacatcaacaacccaatatgattctcataaatgaaacatgcaacctcctttataatcatcattttacttctttttttcttgttataatttttatttatataaatgtttattcgaaagattaaacattatataatctccttgagttttggagttcgtactcttgccagttgccacctacttccagtcttccacaattcattttccagcgtgcactttagcagcagtgcccatttctcactaatatatgcctagttaaagctaaaggaagaactggaatgtgaatgtgaatgataaataaaatagcaaaaaaataatgttctaatgacactagattttaataaaattacgtcttcaataatacgaaaacataaaatcgcaggaccgggttgctcatcgattggttatggagcttcggaggaaattggaccgtttcggatcaataaaaccggttctaatctctatctcaacaagtttacgtggaacacaggttaatattttttctttatagtttcatttgttctggagtcacatcgttcgttatacaacaatgaagtttgtttgaatcttttatttgtaatgaatagaagcgaatattttgtttcttgaatcgccggctggagttggattttcgtacactaacacaagctctgatcttaaagattctggggacgaacggactggtcagtttcttatattttatcaaacattatttgttatcaaggtaatagtttaggatacacttttgttaacaatgaaattacattattaattttaatatgttgacatataattgaatctgcagctcaggaaaatttgatatttctaattaaatggatgtcgagatttcctcagtaccaatatagagatttctacattgttggtgaaagctacgctggtatgtcactcttgaagcaagtcagaattaatatggtttttatttaagtcattttctagaccatagacttattttcatgtctatatcttttataggtcattatgttcctcagcttgccaaaaagatccatctctacaacaaagctttcaacaatacacccatcattaacctcaaaggattcatggtaaaactacggttctatttatcacatttccgaaaccttaatccctccttaatgcatatatattcttttgcacaggtgggaaatggagatatggacaagcattacgacagattaggagccgccatgtatgcgtggtcacacgcaatgatctctgacaaaacttacaagtctatcctcaaacactgcagcttcactgcggataaaacctcggacaagtgcaattgggcactctacttcgcctacagagagtttggcaaagtcaatgggtacagcatctactcaccctcatgtgtacatcaaaccaaccagaccaagttcctgcatggacggcttttggtagaggaatacgagtacgacccttgtaccgaaagctacgctgagatatattacaaccgtcctgatgtgcaacgagctatgcacgctaatcttacctccattccttataagtggacattgtgcaatatggttgtgaataacaactggaaagattccgagttttcaatgttgccgatatacaaggaactcactgccgctggtttgaggatctgggtctttaggtaaaccatgaaactagctgcaagtaaagtacctttcgtgtcctttaaccacattttgttgatgtagtggcgatacagacgcagtggttccagtgactgggactcgacttgccctcagtaaactcaatcttccggtgaaaactccctggtacccttggtactccgaaaagcaggtaattttcatcaaattcgtggttctattcttattatgcagagctagtgatttctcatggtggtggtgtcaggtgggaggatggacagaggtatatgaggggcttacctttgcgacgataagaggggcgggccacgaagtgccggtgttgcaacccgagcgtgctctcactcttttaagatcgttcttggccggcaaagagcttccaagatcttattagtcacacacataagatagaaggctccctccaaaacccgagttaactcggtgttttcttttgaaatttttatgtttcaaatcaacttgatttcataagacactaaaagcattcttgtattcgaagaagatatatgttgatactagaacaattgtgttgataccttgggaataaaattgcagaaaaccaaaagtttcaaatcttttatatataattccataagagtagagtacaaagctctttgcttctgcctgactgatatacaaacaaacaaaaaaagccgaacctctcatacctgaaagttgaaatgaaacaacaaaaacagcttcttacttcattccttcgctgagacccggtggcattcctaagctctgcgcaaggtcactcattctctctttcatagcctgtgaaaaaattcacaaagttcaattagaagaaatggatagaaacaaatactttagttgcattgtgataaatggtctgcaaattgctataccaccacactcttggcgtgtgcgtccttgtatgcttctgtgacaagttgtgatagtttctgccaaaggaaaacacacaacatcaacaagagaaactgatgaattagctttgactgttccataacaaggtacgtatggttactcacttcggaacctagttccattgctgcctcggtaatatcagtacggattggttgctggttacctgataacgtaacctgacacaaattcataaggtttaggtcatcagactttgtaacagaaacaataaagactaaacaaagttttgagattctagagtggagttcttgccaaatcatccaaagactaacaaatcagaaaacacagttcttacatcatcaagtaaacgttagttaatacttcactgatctattatgtgcattgatctatcttaaggccaaaacaagctctaaactgaccttgacaagctcgcctgcacaataaccatcaaattctgcgctgcgaaattggaacaaaaccaacatgcaaaactcattactcatagaagaaaacttcctcaaattttgtatgataaatgtgccggacttacgcagctaactctttttgaacacgtacagcttccacttgaacaaccatttgagctttcttcacagtctcatacatattctgcatattaccaaatattcctgcctaggaaagatcacacacaaacttcattagttccaaaatcataaactttgaatctttacaacatgaagcctaacttaaaatgttcacctattgcagaatctgtttgatatttgaaaaaaccaatgtaatgtaccaacctttgattgtccatcttcactgttattatctttgtttccacctccaaataatccattcactcgaagagacctgtaaccatttttagacttgtactgctttggccatgttcttctctgcgaattcaagctcgcatttcctgaaactattcaaaccaaaaaattactaaagcccatttcaatcccaaaaacacttataaatacaaaattacgcttcaattcctccaattatggaatagaaaagtctaattacgaaagattaagcaaattcagatgaaacctaatgtacgacagatacataaagactcaaaatccagtgtcacgaaaccttaagcgagagatagaagtagggatttaggagagactaaccatgagagaatggaaagagcatagatttggtgaaattggtggttgcagccatcgacgccattgttgtacgagtagagagatattagagaagggctttttttctgaaattcgagaagataaaaccggaagctaattttttccgggcaacttgttcgtagcttctgtgtttgttgaagcttttaaccaatgattttgcgccacgtcactttaactctttttttgagcttagattgtttttgtaccattcttttctagtgaagaagtcgcaactttaaagtttatacactttcagtacgaaattgagtgatcaaacgtaaaatgttcttacatcagatattgattcgattttcgaaaaattcaatttctagtatagatgaaactttatcagagattgtaacatgcttcattaaaccaaaaaaaaaaaaaaacatgctacaatagaaccatctttcgtggttctatgtatgggacatggtcatatgtgttgtggtcttgtggagctgtattgcgagaagaactattgattgattgtggagttgtctatataccctctatgtatagagagactcaccccaaacatttgaaatacctctaggcaaaccattttgggcctctcctgaaagaagacatttatcatcgtatcatgtccaaacaaacatactctgcttgtacagttgtaagtttgtaaaacatatgataaaagcataagacaacacacactccaaaatgcaatcatgatctatacacttattctggtctctctaatggcattggttattattctcatgattctcaatctcacaacaaaaaaaacatcatgcaaatctcctactgtcacattgcataagaaaaaataaaaataaattcatgaattcaatctctgattcctcatggtatattgtcatgacctaacaaaggtttttttggtaaaaaaagttgatataaaataatctaacaaagttacaaagaatcttctatgacttctccaagcaatgaaccttaccttgtgtatcatccattgctagagatactgattctttctgtcctggatcagcattcagagatctcactgggactgtaatgagtttattctgctgtttctcaagcaaagccatgtgttttttcccaagcgtatgattcctcatcgtctgctcagaattcgtctgaatattacaagttttgcaccaaaccgtttccttctttttcttctcaccttttgtcttctttcccgttgtttctttcgccgcaatttcatctactttttgaccctgcggattagcattttcacatactctaatggcttctggttgcggtgctgtaacggaagcaggggataaggaggttgaagcagcttcaggtgtctcattctgttgtgtaacagcagccttatgctttttacctaactcatgatccctcatgactatttgacaataggtcccaactttacaaatctcacaccaaaacttctggttagttcttagcttaccttctgctttctttccactgccaagtttccctgaacaaggaaccttcgaagagactatttctccggtttccaaagacatcgcctttgcttctgattcttttgctttcggccttttcacttgaagatcttcgttcaaaccagtttgaatatcctctgctttacgcttttctcctacaggatcagctctagcctgcaatagtaatcaaagagaacacatatggtcaggatttgttataagcaagtaaggaaagtacgtggatagaaaagatgagatatcacactcgtagtaaaacacttaccaatacaataaactgctctttgttagactccaaaactgatgttcctgtagcctcaggcatttgctgaagtttaggcaattgcatggtaccaacactgtctgctttaggcttagctcctataatatcagctctattctgcaatagagaaatcaaagagaacacatatgaaacaaaggcttatatatactctatcatttatgtttaccattacttaaagaactcaccaatacaatcaaattctctttattagactccaacattgatgttccggtagcttcagacatttgctgaagttgaggcaattgcatcattggtgatgtaagtagactgttgtaagagcctgtgttgatcagagaatcaatgtaactatacttctgtctgaaaaagttgttgaactgattctgattttgatttggaagcttcctttgattgatccacatagttagcttttcctctagagacatctccgtgtctgaaactcgtcgtatcgccatttctctctcgatagccatctcttgtaaaacctcagctataagctctcgttttctcgctgcttctgcgataatgatctcttgacggatttgttctttctcaatttctcgtttgatcgcttcccgaacttgatcctcactttgttgtcctacgaaaaaggttcataatcacttcacatttcgacatgagaagattcataaacttcagatttttcacacagatttcaatttcgtgaaatcaaaacatgaaaaaacaaacactcaaaatttacgttacagaaactaaacaggtctcaacaaatcaactcctatagacaatcgcatcaccaaacaaaatacgaaaagtgcagaatcataacaatgttctctgtcggggatggataaaaaatacgatgcacagacagtacaaacctggcattgatcgttccgacaagaaaggaaagttcggtttcagcgacggagatggtgtcgtgtccgtcgcaggaggtgggcgattattatcgatggctctgtatctgaattccatcgaattcaaaatttggagagagagcggagaaagagggttatcgtttgtaatcgcttttaccttctggtcggtcacttttcttaaataacagggatagcttttttttttctgttttttcccttttttctttcactgttgtgaatcttgtgataatatcaagagattttttaaaaacaatatggaatttaatcatatgcaatacttagcaaatttggttactaatttattagagatttgacctgtgataagatttaaatatatttctattttccttaaaaacttgttttattgaaaattttaaattacattatgtgatcaatctttgacggatttttctatataaaattacaaatttattagggatttgatttgtgtagtggcgtttcaaacaaaaatttaaaataaatgtattttagattaaaaaaattatgttaaagggagttttaatattttaagagattacaattattacattatatgcgtgttcaatttttggcggatttctctatgtaaagttactaatttactagggatttggtttatgtggaaccaaaaacaagttttaaattttagtcaatgtattgtagatggtaattatgctaatattttttttaatctttcaagggctttaatcaaattcaaaaactttgttcaatctttatctttttgtaactttgtagaggtttgacccgcattattcaaattcaaacagattcttaaaacaaaatcttacaaaaattctatactttgaaacattcaaccaaattttaaaatcgtgttcaactttcgatttgtctatataagattactaacttactagggatttgacttgtgaagtgagaatttcaaacgatttttaaaatttaggttaatgtattttaggtggttgaacaattatctttaatttatggagatgattttctgcctaccaatatatcaccgattaaaattctcacatatgattactattaagctaagcggcaaaatcattggcgtcccgaaaaaagtagtattctctctgtttcataagtttggtattgtaggttttttacacaaattaaaaaaggtattttttatactttttgattattattttgtcttgtttaataatattaattctatttctctgttttctctattaatcacagctaaaagtaataataatgttatacaaaccatcaattttttgtgaaaaaaaacctacaacatcaaacttcatgcaacagaagaaatatataataagttctagcgattagttcaagccgcttaactcgcatcataacaatgacatattttcattttaaactcagttaataatgattggagtgtcctatattctttaaaaagtgtagtatgtcttttcatattcgaacaactagggtgttattcgttttattatttgaatggtgcatctcgattatgcatccaaatattgtaatctagaggatgcttccggctgttgtttgtttatatatttggttcttcatatggattccctatcttgatgtaactttgtttgtttttcttttgtatttgttaatttacattcacatcgatgtatttaatatcaaaatgactaaattgtgcatgtgttaaatttaatgatatcttaataatcttaactgtatttacaactaaaaaaatttcaaatttttcttggcacaattataatccaagataatgcaatgtagctcatctagtaatatcatttatcagctggaatgagattaaataatgaaagagtatggtaagtgaagccataccaaagctcccgtgagtcaaccaataaacagacgtcatacgtcaatacccaaaaagatatcaacaacgaaccgtaggatataataaatcccgcaaaataaacggttaaagatctcgcggtacactctgtatcttaattattaagattcacgtcgctggacacaacacctactatatttgtggttgtttgtttcgtgaagcttctctcttcttctctttttcaagtcatcaaatctgatctaatctccgtaaattaatggcgagtagttgcgagctttgctgcgagatcttcatcgcaattcttcttcctcctgtcggagtttgtctcaggcatggctgttgcactgtaagtttcatctctctctatcgatctctgaactttcacagcttcttatttcagaaatcgaaaccgtagttgaaattgaattgattacggttatttaaattgaaattggttgcactccggtttacgggaaccaatcaatatgatgaatgtggagatcaattactgaaaatataattgtggtgtttttgttaaaaagaaacactaattaagggactaaaaaataaaatttttaaattttgtttttcctaactcatgtttttttggtttaacttgtaggttgagttcttcatttgtttgatactgacttgcttaggctacttaccaggaataatatacgcaatttacgcaatttgtttcttgcaccgcgatgagtattttgatgaatacagacgcccaatctactatgttgcttgacctcttgattgattcttgctcttgagcacacatattgtactttaaagtgtaatttacttgtatcctggagataataataccatttttttttaagacacaggtattgtggtttattttactatatactttgatgaatgatgaatgcataatgcccaattactatttgcctatggagccctcatattaaaggtcagtatctatcgcgctatgatacagctaaagaaattagctcagcagtcactgaagtggaagaggaaaaagaaaacactgttttttctctgaacagtgaagaagacaaagacacttggtgaagaaacagagactgacagtgattctgaattcaagatgactaagacgacaataccaaaaacaggaagaaaagtttaaaaccattgttagctattgcatcacttgaagacttcacacttcttttctcttctttcctgttttgctttgctaagttgtttccaggaaagaagaaagaagaagttgtggagtcttttgatgaagatagtgacagtgattactatatttaccctagtccattcgatattgaagagaattccaacagtgaggaatacaatcaaatcttcattgttatatgttaccctagtcctaatacatactatatttatataatggtagtaccatacttaccattaccctgagtgagtttcaacgatgattgaaattgaattaaggcatcccacaattaattagattattaatgtcaaagacaaaaattgtgtaggcactaagaataagataacaatcaacaaattgtgtttttttttctcctcaccctgaaatgttcaaaactcaagatgaacgaaaaaaacaaagatgtaacaaaactgaaccaaatcttccaagtatgtgatattaactcaaaacttatataagaaaaatgattcagactactcctcaagtaaacattttaagactttgccggccaaaccaatttacttttagagcaaactctggcatgcctcaacttcaaccgcctgcgaatccaatacagactgtcccgatggacactcgcgaacactctttatcactgcattgagtacggtttttctgaaccactcatcttccatcttcttcagaacatctctcaccagctcgaaatccaagactttagctgagaccaactcccctaagaactctccgaagctgtttggtgcttttggcagatcgattccaatgtcatccaacatggaaccgtagagcaaacaacctgcccctaagtctttagatgtcagcacattcttagagatcagatgtttcaagagtttggcaattggttcaaccaatggtgggtttttctctagaccgagcgagattgtttccttgacgagctccgggtggtaagatggagattttagttcctcaacgcattgcaatgcctcatccactaaacgaatactgaaatactcttcaagaagcgacttggtttttctctcgagctctcctgcgttcaggctattagccagaggagctgcctgtggctgtggctgaggttgagaccgtggttgcggcttctcaacagttggaatgggtttagaggcttgaggagctgagctagaaccgttaccttgcaaaagagggcttggcctaccaccaccattgaggagacctccgctaccctgaggaagaagccttgagttgactgagagtgacttgttgatagcaggaggtggctgaaaacgcggctgctgcactgtttgtctattgcctctgggcatggaccgggtccgtgccatttcccagccgtcttcatccataggcatcaccctagttcccggcatgccgggcatcattcctccagtaccaggacggccaaggatatttcccaagcccataccgtctgctgcaccagaaaccgcagcgcggttgttgttgttgtttctcatacttgccattgcacccggacgcatcccaagatttctctctgcctcagaatggatttcattgattttcttcgctttcacctgccattgaataagtacaacaacacgtaagcacggataaagaactaaagactgttattaaaagatttgagatggaatgataaaatcttacctcctcacgccttggtacccatttattagctcgaagatcaacaacgttttggaccataaatctgagacgcagctctagctgagggtgccttgctagctccttcaaccgaccaaagtacgtgtcattaatacctcgagatcgtgggctgtcatcaagttgcttcccaatggttataaaaaattggcagagagcttcaacatctccctctgctgggcaagctttagtatcgtctcctaaaagctcctgaacaatatgatgaactatcttctcaggcaccatcttttgcttgagaagttcaccaatcagacggatatttccaagtgtccggagctttgccattttctccttatccattctttccatttcttggtctggattagtcatctgtctgatctcttccttcaatttgccagcaccttcaaatgcctcttggcaattattcaaaagcactcttttaaaggttatttctttcccaccgggttcctcagagggaaacgaaggtagctgtccgttaatatcaaaacacagaagagcatacatctcgcagaatgtgggctgcagtatagcattctcaaaaattagctgtatcacttcctgcaatcaaaggtaagagcaaatcaataccatgaaagagagaactacaacaatagagatcaggaattgaaacaaacctttaggatatctgcggaagtgatgccagcgtcaatcaattgacctttaagaagctcgtacttctccggagtaagcttgtttagaatactgcataaaattgtaaagaatcagtcagaatatacatcacatcaaccttcaaacacaaaagctgaaaagaatagtattagttgttgacaataccctttcacgctcttaacgactcgatctttatctgaaagagctcctcttttagctgaccacggaacctccgctttaatcagcacaggggtaggaccagactgtttcacaagatgatcatgttagcaagaagagaaaactagtaatgatatgccaacacataacaagtgacgaaaacttaccccttgccatgtacttttggcttcacgagggtcgtcccttaaccattctttaccagaggttggaatctgagaacgactatgccagtcacggttatcagtctcggtatgacgatgctgagtatgatttgttatctaataagaccaaaaccaagaatgaaagtttaaaagacagattccaaaacaggaggattacacacacacacacagacacacacttactttactctcggctgcatgattcccccaactctgctcttcgccaaaaagctcaactgcgatttccttacagcgtctaagaatttcatcagagacttgaacagactgcgatcaagaaaacacaaaggtgaatgatttggttcacaaagtcaaaaacagaatcagagaattaagttaaatacctctctgtgctgaagtatctcttctcgggaaaacctcacacgttcaccagaattttctctctacaaaaacataaaatgtcaagagcttaggattcaattacataacataaagtatcaatctttgtccatattcaaattcaacaaccctaaaaattcaaactttgtacaaaattcgattcaaaatcatggaaacgaatccaatcctcgtttaaactcgaattgcgaaaccaaattgaagagaaacagaggatttttcaatgtatttaccttgacgggaaaaggggtttcttcggagccgccattggtaagatcaaaagaggaagaggagctaaagcgagggacgaaaagcctgcttttgccgccgccaccgccgggtctcaaactcaaaaccgatggttcaccttgttgttgcattactcgattctcttgttttttcgcaattagaaggattcaataaaaaaaagttttgcagatagatagaggtatatagtgtatatatatgtgtctgtattgacggtggagaagataaaatcacttcgattccctttttttttttggctgaagctgtgttctgtggtttgccctaatttccttttcttcttctcacgtgtaaatgttattgttaattacgaaaatattctgtatatcaaaataattttatttattgaaaaagaattgatggaaaaatcttacgaaataaagacttaatattgtttttaatgcatcattatcaaaatacaagtctactttcacagaattaattaccaaagtatcctctgtctataatctccaacacaaaataattaatttttgggaaaaataattgatggaaaatcttatgaaatgaagacataattattttgtatttattgcatcactataaaaataaaaatctttgttgcatcattaaaagtgttgttggcatggctcttgcatgagttaagttagttaattcaaagattacctctatctataagttatttatttttgtttcctaaaattatgaatttttaagtaaatttgacaaatatacatatgtataataataaatatagttggtttattagattataatttcttaaaaaataaaaaaataactttatatgcatagattcctttgcaaattataactttattttactccctttaaaattaggaacatgatattcctcaaatttctcccatgttcaatgtgattatgctggttttagtttagatgttaaaataaaaatcctaaaaactaaaaagtaattgggccctttgttttaaagcccataagcccattaataaaaacattgacgtttagcttccaaacattggaaacgacgtagtttcattctccgttgcgttttattcttctggataagagcttcgtgatggtttgaaacctctgagtgaagaagaagcgccatggctgggattaccagcagcaccgttggattcaacgccgtcttcaccggaataaccaaaacagtatcatcacattcactcttctctgttgattccaaactctgtagtcttcgtctctccaaaaccgaactgtctttcactaatctcactccttctcctcgccgtgctttcgccgtcacttgccgcttcggcggtggtggtggaggttatcgattctctggagacaatagaagaggtaggccgaaagaagctgaaattgatgaagctcttgatatctcctcaattaggtgaggattcttaagcctaatcgtgaattgaaaatttctttctgattcgatttgttgatgatgatgtctatgtttgagtaggtcagctactgttaggcttatcgatgggcaacaaaacatggtaaatgtgactcaaattcttcgaattgtagctttgattctgcataataggactcataaatttccagtttgttttgctctctatagcttggtttagtgtctaaagacgaagccgttcgaatggctgatgatgctgaacttgatctggtatgtgtttccattgaaatgctcttacttgtggacattagctatttgatatatgcaatggtttttgtatgatatgagtcagaactcgaatcagtgaaattgagctaatagatggaagattgaactagaatcaaagcaaatattagaagatatgctctgataccgtattagattaacagaatttggataagagttgtgaatgatttatgttattctcttcttcaagaagaagagaatgtacattgttatatataaaattctctttactaagcaaatcagaacttcataaattaatttagctacaccgagtctctagtgtaactaaaccaaccaactataaatgattgattgtgttggttttcaggttatactatcgcctgatgcagatcctccggttgttaaaatgatggactacaggtgagtatctaaatatgtattgaagatatatgccaagctgtgccgtaattaccagtaatgatgctttctttcttttgcgtttatcagtaaatacagatacgaacagcaaaagaggaaaaaagatcagcaaaagaaaagtattgactgtttctgcccctcttagtcttagagttggagatgatatgcttatcagcttatgtattttttttttgtgttatatcatattagcaactcgcatggatttaaaggagcttaaaatggggtacggctttcgttttttttgtttgtctgtgatgttgcaaatgacttctttagaactgaatcctctcaaaggttactgctttttttttgtctgacagttataatattgatcagcatgattattccgttcgtctaagggctgcccaaaagttcttgcaagatggtgacaaggttgttcccatattcttcacgagctgttagagttctgtcccgtctgaatgtaattttttgtttactacttgtaatgtacacaggttaaggtgattgtgagcatgaaaggacgagaaaacgagttcagaaatatcgctattgaactcctcagacgtttccaaaccgaaataggggaggtaataagttcgttctccaccctttcctatatatagaaagtatgtatcagatttcaatgtgtactgactgtgaaatgaatggatcactgaaacttgtcccggatctgtagcttgcaactgaagagagcaaaaacttcagggacagaaatatgttcattatcttggtcccaaacaaagaaatgattcggaaaccacaagaaccacccacaagaaagaagaaaaaaacagcggaaaacgaagcttcagcttcagctgcagaaataacagctgagcctgagcctgagcctgagcctgagcctgaacctgagcctgagcctgagcctgagcctgagccagagcctctacagatcgattcttgagtttaaaatcttgtggtaggattttcagagctaaagtaaagttttgtatatttacttttctaccatgtctcaagagagccaagagctgtataacaaatagagttagtcctatttgaatgatgttcttcgtttgtagatcttttctctaatctatttttttgtttaacttctcagctttgttgattctcaaaagaattgtattatcttttaacagagttacaactttttcgcttccatgacagaaactagataaacactgatcactaaactaattgaggtttacatgttgatagctaaatcgcattttcttcattgattttttgtttaaaccctaagtgatcttcacatccttttcctataagtagaagaaggcagaagaaaatgcgagccaaaaagagcaatttacaagtcattttgtaagtgtgttgttgttaaggccattgaaacttgcttaatggcaacaatggagaagactctgcatcatctcttacttcttcttcttgcttcttttgtatcagatgagtcttgaggctacgctcttctatctgtattttcacgacgaaaaactcggtttaacgtgttgaactatattagtcattagattcttggatttgtatttttgatttgttacctccatgactgcagttgatgccaagagattttcacatttgtcaagcaaaaaattctctgttttagctataacagcgagatccgaaacaagtttgttcatctcctccatctgcgaatgtaaagaccagatggatgatcccatactctgcattacatcaagagctgaggacatagctaacttcagagatcctaggtctgcctgtgatcacaagagcttttacaaaatcagaactcggttcttgctcttcgacttgttttctagttttctcggaaaacgtaaaccgtacctttgttcctccggctagtggaagccggagtgtatttgcttctaagtctccaatggctccagctaaagaactaatgtgttctctctcaaccattgcccaatcctcaaggcaaaccatctgcgcaaataaatacatttagatcatgaggatgatacttcgatgaacacaaatacacaaatgcgtgcgagtgaagacatacctgatcatttaagatggatcttaacttgatttctagcttcaactgttggagacaaattctttgagttgtcactagatcccttaggtctgatattgcatgccaaacattgtatagagtttcctgtaacctcaagattgttaaaaacagaggaagatacacttaatacaatgtcacattttttctgttttgagtatattaccttagcaatcaagctttgaacatagctcactccctcagctcgagcatttgcaaaccgccactgcgaatatcgattatagagcaagcgtagttgatgaacatcttctatgtaagtcgctttttttcctttcttgacatccgcaatgaagctgagaaccgaggtgttggtactactggattgcgcggtttgtcttatccgggaaggacttacacctcttgatggcggtgtagacgatctcaccaaagagcggtttcccacaggactcaatcctctcataggactcactcctcttgaaggactcatgcctcgagaattagaagatgatgatgatgaaaatgaggatctgctaggagaagcagtacgtgatccaggagcagacattggatgcaacctaggtaatgaacttgtagaaaaatgcttgagagactcagtgctactactatcttctgaagttgttgatgacgaaacttctagtctaccattatcataacatgaaaacaaccttgttatgtcactagaagacttcttatgtctagagcttttattggacaaaggcaatgacactctcctgaccgctttatccccaagatcaaagcttctgttccccctaattcgaccagaccatcgatgctgtggtggtattaacatactatgagaaccatccataggttttgaattctctgattgaccaggagacacattctttcccttcaatggacttcttttcctctcgggcgtttgtttccttgttacagaggttgtctcactctgctgcttatgcgctatattcgaagaagacggtctcaatgtccgatcagtcgaagaagtaacaagcggtttctccttcttactaacaggaactgacactgaatcagactgaaaagaaacactgaggcttctcatagtagaaggccataagctttcaggtaaacgaccagtagatagtctcctagaagaaaccggtaaatctaccaatacatcactaaccggcgtagttggtgtcgaaggaccacggttcctctccgctgaaaccgctcttttcaagaacgattcaggtgatgaagaaggcgcagtcctggtgacaataggtgaaggacatctcctagttttagtaggagtcggtgatctatatcttgaactaacctccattgttctagcacggcgcgtgacagaacctacattgttcttctcagatggagcaagaggcggtcttggacttgtagcgtcacttactgattgctgctgtttccccattgatgctttcttggaaccaacttgcattgatttgattcagcaactaatgtttctcattgtagactctttttattctgccaaaagtaaaataccttccagatgagcaagatggagcaaaagcagagaatatttttagacaacccaaatgataaaagagagctaaagattaaatctttacaacagaaacacagatcaagaatcacttaaagagaaaaaaaaaaggtaagatcttatttgatcaagaagccaaaacagatcaagacatgtagattgaaaaagacaatccttggtccatgggacaagctgactagtttcataaagtaagttaggtcccaaaagaaaaagtgacaacaagaacaagctgagacctagcagagtaaaagctagagataagaaagctgtgcctaaggactataaaaaataaactctcaaaggtctacaagtagtagagtttaattgcttacactttcacagtttcagagatattcttaatttcaatcaaagactttaaaaacttctgagcaaaaaacaatctttttcagtgtcattgtcacgggtgtgccatggtcggatgggctggagaaaatttaatggagatttcacagacccacctttcttcttcctctcttcctatcaaaaaatcaaaaacctcaaagtaaacaaaaagaagtttcctttattagcatctcaagaatttttaataatgcattttagaaacagtttttgattataataatgctaagagtttgattaaagaattagcaaaaatggagattttgcagattcatctgtttcctatatgggaagagacaaagatgaccacgtgtttagaagaatcagtgtctctactctctgataaaaatggtgaaaaatttggcggtaatatagtaacaaactaacaataatgcaaatgaattagcaaaaaaatctggtgattaatttatatttttatgttttgaccatttgagaaagaaagaaaaagtatgattttcttgggaaaatgaagctcgtgaaacaatgaaatttgggattcaaaaaacaaaaaaaaagtgtctgaaagtgaacacgacttgtgtctgtgaagaagcagacaagttttatcgattaaaactatttttggaatttattatgttaattaaattctgcaaaatcttaaacttgttcttggcttcttcattaaaatctccagaaatggaaacaagattttttagtgtatttgtcttgtctcagatcaaaatccagcaaattaattagggtttataattattatcaaaatagtgttaaaagaaagtaccactaaaaaaagtagattaagtaggaaactggagaatctcacctggactgatgaagaacgcttgatccccaagtaacaaaccctaaaatttgtgctatatcttcgacaacttttgtttttgaagctcgtaagacgctcaccacaagagaccagaggaattttgacccaaaaaaagagaacagaggaatttttgttttgattgttattttgttacattgtatttagatctctttgacaagactttgctattttcaaattttcaacttatgttttattagtattttttgggtaaccgtaaacagaaaaatgttattcgttatatatattaaatcattgaccctacaaaacatcgtatgatgatagtgattgtcattttgacaatgtttatgttaatatttaactgattgctttttgaagtgttgatttatacaaccattaattgaaaaaaaaaaccaaaaaaaaaagattaatactctataaaatggagagaaattaattcatctcctttacggtttaactaattttattgtctcttacttctattttggttaagttctcttacttttgtttccattattttaacactaccagtcaccaaatcagactcacagttatataatgttttaagaagatatacagaagtatatgaatagagatcataactttattattaattcattcattaatatatgttgatatgtgctaaacataacaaattaatctatctaactcgaccaaaggaaagagaaaagactaattacacgagcttacctaactgcactcacaaatttgtatgagtgataaattgataatgacgctatataatgtaaccaagtaatgtatagatttagctaaaaaacaaagtaatgtatttagccaaaaaataaaagaaagagagtaatgtaatataatgattgttgtaaaaaagaatgtaagataataattactaatattattgaaaccaacacaaatttaaaatgccgaaagtgaaagataacttagattactctagattgtttttggcgtttggtgttgttaagtatataagcaaagaaagaccaaatgatgagcattcatgtgcttaaccaaatgattatattgtgaccaccatttttattgcatatgccgtgattctcctatgtttccatcccttttctcttaagttattggatctagtttgtgcaatttcataataactttcaaaattagattatacaaatatttaatcttcatttatattaaagtgagaagaaattcagtaacacacacaaatagtagatagatgattcccaattttacttttgtttatgattcagacatgaatcttcaatacgatcaattcaatgccaattcattaaaaattatctgatggataatcatatataattttctagcaaaactagacaataaaatacaattgcaaaacatggtgtgttttcttgcgtgtgatgaaacgtgtagtatacgctatcatgtaaaatactgtgtaaggaaattttcatttggccttagatcactaatctagactaattcatttccatggtactcttcactgatcatctaatcatcaaaaacttccgttcgcaatcaaatgatcaaggagcattaaatcccagcttaaataaccacttagcaccgtgatcatcaatttctactaactaggaatgctaaacactcactaagttttttttggtaatttcattgaacacaatccaagcatgaaacttcctatgatccacactagcttaatcaaagacttatctagcactaagaacacctaggaagtaaggatctattgaaattaattcctaagcatcttgaatcaatcaacaaccacccttctctactaaactcaaaggctcaaaggagattactcactaatcataatgaaaacacaaagatccatattgtttattagcataatcattgtagattagagattagtaaataaaaaactaaaagaaaacaagtttggattttataaacatacttaattagagttcatacaaaacctaaaaatggaaaagagaggttcaaaacaagcataaaatcacttcttcttcatctttctaacttgtgattgttgtgacagtactctcagtgctctcagtctttgtgagaagcatagtgaaagtctatcttacgttcacaaagacatttaaaaaaaaaaaaaaaaaactttttatgatgataatttgatctgaagtaatggtttgaaatttggaacagaagtctttaaaggaattttaaacacttagcaatgtcaaatcttcatacatgaaaaagaaaaagatgataacaatgcagagtctgggaatgtttcaccaacacaagaaacaaaacaccaaattcaagaggggagaaaccacatagcatccttgagttttaagttggacagactagggaagcgtttgaaggtccttgttgcaatgttgtacacacatatgtcgactaggcatggaatggaaccgtccttgtgaccgaaacggtcattacgagtgaaatagatgcaattaggctcaataccaagggtatggtcagcaggcacggtgataccgaaatcgaaaaacagggcctcgtcacctatagattccacctcaacaagactggttccacatatatttccttttagctctttttccggatccctcttgtagacgtggaagatcctagacctttcaccgagtgactcgaaagccgtggtaaagaccaacaaaacatctcctgatgttgtaacagcaatgctatcgctaaaagagatgacctttttgatttccgatattcctaaatcacgcccaaaggctgaaaccgatattggaaacctaggggtttcggacacattcttgaaaccatcttgtccggacaaatcaatgtgtcgaatgaagctacggttcaccagaatgtaaagattgtaacccttgagcaccacatcttgtaggcctcggaactccctccgaacatcgacacgtattggaatatcacggtaatgtaaatctcctttcttgcaaaaccctaaaaattggccttgctcaaattgccagacaacaacaaagtcaccattcttgtcgtctacccacaaaagacctcttagatattcggtagtgtgaacacatcaacgacctttcagactgcctccaattaacgtaaccttgaagtcattagatccttctcgctcaaccatataaaggccaccctgggttgactctagaggtggaagactgatcctctcatcgctaaacacatctatgatatagagatcccatctagaatctaccactaggaaccacttacccgagcttgctaggaatcgataccctgaaaagtcactcttcgtctcgtaaaacttatcttcgtctggcttgtacagacgaaaaccaccctcttctggagacaacaacagcaacggagatccgagttttggatccagacgtggggtcttagcacgctcattatatttaggactcccgcttcgttttgaattaccaacttcagctacggatgctggtcgatcatctagtccatccattatcagaacggagatgatcttgtctgctgctgatattaagggggggcgtcaaattacacgtacactaattactaaacgttgataccaaaaaaaaaaaaacgtacgcaaattttgtcatctctaattaatgaacagtgttttcgttttataataaattgttttaaatcagtatatataaaagtttgcaaattatatctatctataaattatttttattttatagtttactgttgttattaagtaacgtcattccaaacccgttccgccaaacccgtcccgtaaaaaaaaaccgcagtacaccgctaatttaaatatataatgaaaataaatgttttacgggcttgcaattgtattttagtttgtcaaacaatattttgttttaaatagttgtcgaaatctagttcaaattttggagaaataagtttagtgaattgataagaaatgtatttaggtgtgttttgcttattttaagggattgcaattgtattttggtctgtcaaatattttttgttttaaatagttaccgaaatctagttcaaattttggagaaatttgcatgatatatgagattgaaatatatttggaatgttttttatttgttaattaatttattgcaaaaaaaaaatcaataattaaaagccaatagcagccattgtaaataagttccaactccaggatttatttcacaaaatggaagcaaaaatgtatatatagattttgaacgggtcagcttcatcgttgctgatttttttatgggccgatcactattttagtggaccgtctttgcattgggctgattatctcttaatgggctgtcttcgtcttgaaacgagtcaaaaggaagggtgttaattccatctccaacatttcattcatctatcttacacacacacaaaaaaaaaactgtgatttgttcaattttttatattttaataggataaagatctatttaggagtttggaggttagttcctattgcatacttcatcttcggtaaaactaaaccgcctagaggtatcgatctctggcttgaagagagagttctcgaggaacattaatagtgtgtagaatggtttatgtaaactgagaatcaattgtgactacccttggttaaaccggaaccttcttctataaaaagaggttttcattgtaacaaacacttaaaagaataacagaataaacacaatcttaaatcatcgtttgtatcataaacgtcattaatctcaactaggtcgtctctataaatttgcatctatctgtcctatcgtatttcatatctcaaattagttttttcttggatttataattattttcaatatttaactataaatctatattattggattattattattattattagattttgtttgttattgttcaagaacatgatgatctgagcacgagtttagatatagaagctcttagaaaaaaataagctgagctgagctaacttatgaaatatccgaactcattatgagctgactaatatattgaagctaactcacagaaaaagctatcaagaaattttaatatgaaaaaactaaaaaaataaatgaaagtaatatttttttctgaacacaaaaatgaaagtatttactatatatatactcttgaccaaaaagagaaatgatatttttactcacgacattacgtcgattagagaaagtgtggcgtaaatcacgtgagatcaaaataggaaactcagcaagaaacctattattcacttatattgatatgacctgcagtgaggttacttatttgatttaaaaaaaaaactgatttatttggtgtgcataatgttttttgttgttcactgcgggccggtcgatgttttttaactaagaaaattaaattttaagttcttgctaaaacaattttgaattttatattttatttattttgttacagtatttaatattatataaatgtattttgagtggtaattttaggattttacatgcgctataccattccaaattaatatcgacccaaacttatctcacagtataaccccattatgtgaaattaaatatcactttattatttttcattccaattatacttttatttaaaacacatattcatgagtcacccatagtatgtttgcttatattgtgaccataatattcctttcgttgtgatccatgttgccaaaacagacatcaattaatgaaattgtgtgtatttcgtccatgtttactcaaaaaaggtcaatatctttaatgtgatcagcaatgtgacttacgaattccccgaattccaccaaaacacctgattgcatcacttttttaatgtttctgaagcttacaaatatcatgggcaaaactccagcaaagccataaatggttggagaagaaaatctagttacatctaagggatggtccgataggtacacaaatgcctctatcatagaacttatttcatctctttcactacttttaaataaacatctaagaacaccttctacgtcgaaaacctacaatgtggcttaaattattgtacgtaggcaatatatcttctgaatttgcattctccgaccaatctatcatctgctggaaatgaataacaagctccactgaaatctcattgaaattagaaaatactctatccactttcatcattgagctgccgcaaccttgactaaaagcaaagaaatcgttttccaaatctcgagcttaccatatattcgatacattcatgagataaagcttcattgaagccaacatccttcaagcctaatcaataaaggccacacaagttgtagttttgtcctccattgataaaacaaattttatgataataggaataaggtacaaaaatatattttttgatgcaatacatgttgccaaaacgtatatcaaccaacgaaatcttatgtactttgtccattaatcagtatgattcacaacttccttaaattccaccaaaatttcggactttggcctattcaaacccattaatgactgtttaaaagctttggcctaaagattaatgttaagatgttgtcatctttggtttccattgatttaatcatttctttctttattatgcacacttggccaagtgttatcattttgagcaaaaccaactataccggttttctcctaaccggaataaaccgaagtaaaccggatatcacatcatccgttcactctctttagctcttaaggcgaaaaaagcttatcttcttcatcatctctttcctcaatcggagtgagcgcaaaaaatcaaaaattcgccgagagcacaaaccctaatggcttctctctcaatggcttccgttaacgttagcttctgtcatcctttacgctcttcttctccaaaggtctcacttcgcagttccgttcatttcgcgacgagtctttcctcaagtcactccatttctgggcttcgcgctgttttgcctctgaagatttctacagttgcttcccccaattctcaaaagcttcattcttttaccgttttcgctcataagggctacaagatgaagacccacaaggtacttttcccctatctctctcactttctctgcatttctggtttttggttaagttgagctgaaattgaagtgaagtactatgatttggagagtatagtggcggaaattggaatatcaatgctttgaaagtttggatttttcttcggttcactggctattcttgtgtctattggtgtcatagtgatagacttaagagtatatctggtgaagtttgagattactgacactgagaacttcatattagctttagaagttttgaattgtttcagtaaaggtgtttccttttcttgattggtgttaagtctttgttgaatggaattatgagaatgtgtaatgtattttgttgataggcctcagcgaagcggttcagagtgacgggtagagggaagattgtgaggaggagatctggaaagcagcatttgttagctaagaagaacaacaagaggaaattacgtctatcgaaaatggttcgttttctttaatcttgtttggttctgcatatcgtgatgggtatatagttttgtgtgtgtgaaatgcattcgtattttctgagctttagtgattagctgtgagtgggttttgctgaatgtttcagcatgtggtatgaatcgttaggaaaagaacatgctcttagcaaacaaaaactcatgttatcaacccagttatgacttgtttgctaatgtcttggtagtaaatatacggtttcgtttgtcgaaagacatatttttgaacttcaaaccgtgtctttcattgtgcatttgcctctgtgcacctctcgctgaatctcttaaatgggggattaacgctattggcagaattatacccttgatatggaaaccatgcgattgatatctgcagtggctttcattagaaatgtggctaagggagaaatctattatcatcaactagtataaaagaaaaacaaaactaaatcttgtggcatcaatctaatgatcacaagttcaagttattacttgttttggctttgttaattagcaacttcgctgctctgttctctcttacacgtttagctttgtgttctgtcttctgtattgcagacggaagtgaaccggagcgactatgacaacgtgatcggagctctgccctacttgaaagtcaatcgaaaggcgacttaagcagagcaggcttgatccttttcttacctgcaattctcattttgtaatctaaagttgtggtaatatccttttgtattgtgatataatttggtcaatgagttgatttttgtttcatatttgtgtcttctttttcttgtctcgcatgacaactattctaggtgtaacatatacctcatcaacgagtttggtcattgatcaatgatttgggttaagaaatcagagacagatatatcttaaaagacttcaaagtattataatcacaccaatctcacttatgacacttttcaagtctcacaacccaatccattatttttttgttgtcaaaagcattaagataaaatgcggctgtgatagtgactcactagctaatgcattgacaatgggagttcattagataaagaaaaaatacagtacagtgtaatgtttactatattaaatgttcggttctccggccaaatagatgtaaatctttgagtaattaaaaaaaaaaaatgttcactaactctggatttagttatatgggttgtcaaacttgtcattgcaacaacattcttataaattatagactataaaatataaatcatgatcaatattttattttacttacctatattaaattaaaatatccaaatttaaaaaattctaaacataaaattggaaaatttaaatcaaagtgacacctagttgtaaaattttaatagatttattttttaatgtcaaaaatgcaaacacaaaaaatattataatcatcttttttttttacatatattaaagtaataaattatgattggattcatatgtcaataatatatatgattgattaaaatcttctaaaccttttctattttgcactgtaaaaaaacattttctattataaacaaaaagaaattattgaacactttagatgatgtgttaacacattagtaaactaaatatcctaagacacttgatatttcatcataaaatgtaagaaaattgctaattcttgggggtgtttagcaattagcaatcttttataaatgttaagacacttgacagtaaacttaaatatcctaaagacacttgatattttataatttatgatgaaatatcacattttaatttgatacaaatattggaaccattttaattttataatatgtgacgacaaaaacagaccaaagccaaagaaaggagaaagagaaattagataagaagctagcgtccgaataatatgacacgtgtcaaattatccatcaatagccgtcattaaaaaagcaaaacgtgggacctaaacagcctatctcaaccaagtattgaaataaggaatgacaaaaatagcctcctacgtaaagacaccataaaggccaattcgggtactttctagaaactcaacatttgtttctattaaaaaaacaaatctctcaagcgcgtggctattcaatcgcgtccttttcgcgttcttttagatcttcaaatcaaaattcgttactctcttagattctcagggttttgtgttttttggattggtggagatgatgagatcagagaatcatctaagacaagctt

SEQ ID NO: 274 - DNA, 96046 bp, Arabidopsis thaliana
gaattccaccaaaacacctgattgcatcacttttttaatgtttctgaagcttacaaatatcatgggcaaaactccagcaaagccataaatggttggagaagaaaatctagttacatctaagggatggtccgataggtacacaaatgcctctatcatagaacttatttcatctctttcactacttttaaataaacatctaagaacaccttctacgtcgaaaacctacaatgtggcttaaattattgtacgtaggcaatatatcttctgaatttgcattctccgaccaatctatcatctgctggaaatgaataacaagctccactgaaatctcattgaaattagaaaatactctatccactttcatcattgagctgccgcaaccttgactaaaagcaaagaaatcgttttccaaatctcgagcttaccatatattcgatacattcatgagataaagcttcattgaagccaacatccttcaagcctaatcaataaaggccacacaagttgtagttttgtcctccattgataaaacaaattttatgataataggaataaggtacaaaaatatattttttgatgcaatacatgttgccaaaacgtatatcaaccaacgaaatcttatgtactttgtccattaatcagtatgattcacaacttccttaaattccaccaaaatttcggactttggcctattcaaacccattaatgactgtttaaaagctttggcctaaagattaatgttaagatgttgtcatctttggtttccattgatttaatcatttctttctttattatgcacacttggccaagtgttatcattttgagcaaaaccaactataccggttttctcctaaccggaataaaccgaagtaaaccggatatcacatcatccgttcactctctttagctcttaaggcgaaaaaagcttatcttcttcatcatctctttcctcaatcggagtgagcgcaaaaaatcaaaaattcgccgagagcacaaaccctaatggcttctctctcaatggcttccgttaacgttagcttctgtcatcctttacgctcttcttctccaaaggtctcacttcgcagttccgttcatttcgcgacgagtctttcctcaagtcactccatttctgggcttcgcgctgttttgcctctgaagatttctacagttgcttcccccaattctcaaaagcttcattcttttaccgttttcgctcataagggctacaagatgaagacccacaaggtacttttcccctatctctctcactttctctgcatttctggtttttggttaagttgagctgaaattgaagtgaagtactatgatttggagagtatagtggcggaaattggaatatcaatgctttgaaagtttggatttttcttcggttcactggctattcttgtgtctattggtgtcatagtgatagacttaagagtatatctggtgaagtttgagattactgacactgagaacttcatattagctttagaagttttgaattgtttcagtaaaggtgtttccttttcttgattggtgttaagtctttgttgaatggaattatgagaatgtgtaatgtattttgttgataggcctcagcgaagcggttcagagtgacgggtagagggaagattgtgaggaggagatctggaaagcagcatttgttagctaagaagaacaacaagaggaaattacgtctatcgaaaatggttcgttttctttaatcttgtttggttctgcatatcgtgatgggtatatagttttgtgtgtgtgaaatgcattcgtattttctgagctttagtgattagctgtgagtgggttttgctgaatgtttcagcatgtggtatgaatcgttaggaaaagaacatgctcttagcaaacaaaaactcatgttatcaacccagttatgacttgtttgctaatgtcttggtagtaaatatacggtttcgtttgtcgaaagacatatttttgaacttcaaaccgtgtctttcattgtgcatttgcctctgtgcacctctcgctgaatctcttaaatgggggattaacgctattggcagaattatacccttgatatggaaaccatgcgattgatatctgcagtggctttcattagaaatgtggctaagggagaaatctattatcatcaactagtataaaagaaaaacaaaactaaatcttgtggcatcaatctaatgatcacaagttcaagttattacttgttttggctttgttaattagcaacttcgctgctctgttctctcttacacgtttagctttgtgttctgtcttctgtattgcagacggaagtgaaccggagcgactatgacaacgtgatcggagctctgccctacttgaaagtcaatcgaaaggcgacttaagcagagcaggcttgatccttttcttacctgcaattctcattttgtaatctaaagttgtggtaatatccttttgtattgtgatataatttggtcaatgagttgatttttgtttcatatttgtgtcttctttttcttgtctcgcatgacaactattctaggtgtaacatatacctcatcaacgagtttggtcattgatcaatgatttgggttaagaaatcagagacagatatatcttaaaagacttcaaagtattataatcacaccaatctcacttatgacacttttcaagtctcacaacccaatccattatttttttgttgtcaaaagcattaagataaaatgcggctgtgatagtgactcactagctaatgcattgacaatgggagttcattagataaagaaaaaatacagtacagtgtaatgtttactatattaaatgttcggttctccggccaaatagatgtaaatctttgagtaattaaaaaaaaaaaatgttcactaactctggatttagttatatgggttgtcaaacttgtcattgcaacaacattcttataaattatagactataaaatataaatcatgatcaatattttattttacttacctatattaaattaaaatatccaaatttaaaaaattctaaacataaaattggaaaatttaaatcaaagtgacacctagttgtaaaattttaatagatttattttttaatgtcaaaaatgcaaacacaaaaaatattataatcatcttttttttttacatatattaaagtaataaattatgattggattcatatgtcaataatatatatgattgattaaaatcttctaaaccttttctattttgcactgtaaaaaaacattttctattataaacaaaaagaaattattgaacactttagatgatgtgttaacacattagtaaactaaatatcctaagacacttgatatttcatcataaaatgtaagaaaattgctaattcttgggggtgtttagcaattagcaatcttttataaatgttaagacacttgacagtaaacttaaatatcctaaagacacttgatattttataatttatgatgaaatatcacattttaatttgatacaaatattggaaccattttaattttataatatgtgacgacaaaaacagaccaaagccaaagaaaggagaaagagaaattagataagaagctagcgtccgaataatatgacacgtgtcaaattatccatcaatagccgtcattaaaaaagcaaaacgtgggacctaaacagcctatctcaaccaagtattgaaataaggaatgacaaaaatagcctcctacgtaaagacaccataaaggccaattcgggtactttctagaaactcaacatttgtttctattaaaaaaacaaatctctcaagcgcgtggctattcaatcgcgtccttttcgcgttcttttagatcttcaaatcaaaattcgttactctcttagattctcagggttttgtgttttttggatggtggagatgatgagatcagagaatcatctaagacaagcttcgaagcatcggaacaacaattttccggtgaagttagagatcattgaagattctcttgaagaagaacacgctcctctcaacaaacgatccaaggttttttgttgagaaaacttttgtttagtactttcatcttttataaagtttggatttttattgtctgggtttgaaatgaatttagctatggagcaatggaacaagtgtctctaagtttagtctacttgaagagccaagtcctttggggttgagtttaaaaaagagcccatcttttcaagaactgattgagatgaaactttctcaaagtggtgatgactcaaattcggttaagaaagaaagttttggttttggtggtgtaggaaccgttgagaagcttaaagcttctaactttcctgctactattctcaggattggtcaatgggaggtgagtctttcaaagtttgttttttattggtgtgttttggaatctgattttgaattttgtttgtagtataagtcaaggtatgaaggtgatttggtggcgaaatgttactttgcaaaacataaacttgtgtgggaagtgttggaacaaggtcttaagagcaagattgagattcagtggtctgatattatggctttgaaggctaatttgccagaggatgaacctggaaccctgactattgtggtacgaaatgaattcttgtgatcgtttcgtttgtttgctcgaccatctatgttttaatttgttatctttgttctgtttttcagctggctaggcggccattgtttttcagagaaactaatccgcagcctagaaaacatactttgtggcaggcgacatcggattttactgatggtcaagctagcatgaacaggtaagaacatttcttatgtccttagtcttaactcgtgagtataggctgataatggtttctgtatctttgtgatatggtaggcaacattttctgcagtgtcccccagggattatgaacaaacattttgagaagcttgttcaatgtgatcatcgcttgttctgtctaagccggcagccagagataaacttggccgcaccgttctttgattcacgactatctatatttgaggatccctcagtgtctggatctcataatattgcatctcctgttggggctcagtcatcatcagaacatgtgtctctatctcatgacgcactatcgcctagctcaggtattttgtttgtttccactatcttatcgttcacattcgtttctctttacttgtggtcatacgttcttgtttatatatagtgatggatgctcgtgcaatcgaaggagttggtggttccattgattcgaggaatacaaacggttggagtcagataaaaatgcctggactacaccaatctatctcgatgaacgatttccttacgtttttgtcagatcaagcttgtgaaaacaaccaagagtttgaggaaatgaaacagttactgctaagtgacaacactcaaaccgatccatctgatgagaagtctgtcatgtcaaaggtgaattctttctgcaacctcttgcaatctgctgcaaactcacagctcaatatcgaaactgctgataccgaaagagttgttggggtcgataacaatagacacatgcccgaaggaggcaaaagagttgttgaccctgcttcaagcagcaagccactacaagggatgtcaaggaaagactcattcagtgatttgctggtgcaccttcctcgaatcacatcactcccaaagttcttgttcaacatttcagaagaagactagtagatagtgaaccgaaaagttcttgttctaggaatcttgaacaagtagctgtaaatcaaattatctctctcgttcttaaggatttggaggaacttttgtgtttgatgatgaatccttgtaaagaaatgcttttgtgatggcgttttctaaaagccatttctttttttgaaacattaacaaaactttattattgctttcatcctaaactcgtgttctttgttatcgtatagagaaagagaggcagaacaagtaacttttcttcacaagaaacattttttccttcgaagacgtttcagttttaaacatggtttgttttggttttaatgcacctcttcacttcccccaagcgttactttcatctacctcaaagttttaaatagagtagacgaatggagatctttacatgattcgttctctcaaaatcttaatttgtttgatttcatttatgaagcagaaacaagttaatagacacatagagagatgatacgctgcacaatgcggacagtgctacaagaagagatttatagagtcttaagagtctcaagaagcgtacaaggagatgaggagtgaatcaccaaaacaagtggttttggtttgtgaatcaccaaaacaagtggttttggtttgtgaatcagtatggtttacccaaaacacttgtttggtgtgtttacttctgatctcttcgtactcttcttgcgattctatgacactctacatgtaacatcggcatggtttaccaaaaagccttcaagggtgcaggaggattttgattcttagagaacattgctataaagccgatgttcattgcctcaaggtaaaaggctaaagagttgcaaggaagtcgctgattttatccaagactacgaaagattcaaaaatataaggcgtgtcttttgtcgttccaaaagtgctgaattttttatgaatttttgccaaaacttgtttttcttcaaacacattttggcaacatccttagactttccttattcacttagaccaacagtttttcttcaaacacattttgatctagatcttttacacaagacaacacatctaccttaaattcacttgatttttaaaccaaagccagctctaacaataacaaacataagaggatgattcttatgtataatggtacttgtaagtgaaaacgttttgaaacagtaacattttcagctaacacaaatgaaaacagaggtttctcttgaggacaattacaacatacgaaaaccaaaatactcttaattcgatcgatcccaacaagttaagaagtctctacattccggtgaatgcttttttccctatagcagaactcccagcaggaatgacctttaagacgttaaacctcaccgtctttgacaacggtctgaaacatcattttaagccaatggtatctattagcatgtaatttatcacaaagattctaatgaattcaagataaatcattactgtcctcacctgcattgcccgatgatcaaatgatctccttctttgacacggaaacacggtgagacatgagcgggaatgttcgaatgccttttctcatacctgtagatacttcaaagttaaaagactgaaaggtggtatcgcagcagaaggaagccaaaagtaaagatctttttgtcacctttgatacttcttaacaaaatgaagatagttcctcctaacaatgatggaatgatggtcctctgcattttcgcactgtgacaagtacctgctaagatacgacctctaatcgaaactgtcccagtaaatggacatttcttgtcaatgtatgcacctacacaattcacaaacaaggaacaactcaaacactacataaacacataactcattccaataacacataactctaaggaaatgaagaaatcaaaagatgttttcgttaacttttacctcaagaagacattcggttgcttcaagaatgccttctccgtctgcaacacacattaaattggagctcagagctcagaggagaagaaaaaaggaaagagacatgatcttttacaaaaatgatagaaaagaagagattagaaacctgctccgccattgttgaggttggtagagagtatcgagaaagagaagccctaaactgcttgtggaaggagaaaatgaccctaaatcgcaaaagcggcagattcgtagttataataaaatgggctttgggactcaggccctgaaatcctgatgacccattcattgctaaattttctttaaacttactaaatcatcgttattgtgttcttgttttgtatatgaagtctctctctgtacaacattacgaatgacagatacaacacaactctaatcctaatctcatctccaaaaacaagcttgatgcaaatgactcataccttacatcaattattcaagactgtctaggacctacctactgagctagaaacttcttcaatgctgccaaaatttctctaagtagatttgtctgaattcctcttctgctgcaagataatttatgtcagaatcttagtgtgttgcagtatcagtttgtctttcttgcacatttctggttctttccatgtcattttgaggtggtggatgttatttacaggccaccaaggaagatccctgcgtcaaaaacttgctcccttcttcagatggttcactggtgctacatgcatgactcagttgaagaagtactgtgatttgagaacttcctttaaatcgaaatcacctctctttggtactggaggaaacacgagattcgggtatgattcttggaaactttggagcaactgtatcaagaacacaacaatatcaacaagccaatcgaggctgtaattcatacaaacgcttcaatcaaatcctaaatacagttagagaaagaagtactaactagagcatcatcattaatgttgatattcaataaagatagctttgtttcaggatttcttgtgatcgtaagtataaacttgtgatcagtaaaagctggaaaatacttcacatacgatttgaaaatcgtctggtgaaaaccacattcatttgttttggcagatgtgcagaaaaagaaagtcagacgtttagtcctaagcttctaactagagagttatcgaaaacttacatcttcaaggatcggtgtgttgtaaagctcaacgaatttctctctaagtattctgttcattgtgtcaacgtcacatgcatgggtccagtatgagtcatgcacacctgcagaacccaagcattcaataagaagataatacttctttttttgttggtaggccattagtcgaattgacagaactaacctgcaaagtttaggccggcctctcgacatgcaacagcagtcatcatcatgtgagtgccgtccagcgagtgcacaaagttgggaggaaatgcagttctttgtttcctaacatcgacctgcgaattgatagtctttaagcaaagacccactgatagtcttgctcagtgaaaacaaagaaacaaacaaatcggctttaccgtgttaccctctcgctgcagagccaaaacctgaagagatgttcttatctgtaatcacagtggccatatttgattacaaagtcaaaattattggctcgcagagagatgatttttaaataacatgaaggattcttaatggataatacttaccagatgtctttcacttctgcaatagggttgcacaacaggaagcccaagaggggtgatccatcgcactggatgattatcggaagcaattatctgtaaaattgacaagtcaaaaagaaaacactagtaagtctctatttactaaacgtagaagagcagagttaataaacatgctacaagaccacacctttgcacaatcaccaagccaactcataatggcacgtgccgcttcaaatatctctccaagggcagctagcgtcacctgaggagaaatgtttcaagtataacattagtacatagctaaaaacaaaataacatttatccgcgtgaatgccactattcttcttacttttgcagaatagcaagcagcagcaaataacattctctcgtcagtgataacacctttctcttctaatcttctttttatttgttcacgagcccctacataggtgacaccatatactgacgtcattaccgtctgctttaccagcttcctgtcgacctgaaattagaagaaaacattgcatcactgggaagaacttttgctgtggcataatgttcaatcaaaaaccgttgatactcacttgagtgataaggatctttgccagtgcggcggttgggtttgactcaggatccttactgctgtccttcttcattatttcatgaactctatctcagcacaagcaaagaagagaggagtgagaaagagagacagagagaaaaaccataagaagctacacctgacatgattccaactcgaataaatgaaattgacagctactccattcaaaattgatatgatacctccgtgaaatttcagagtagacatcagctggtttttctcctgcaactagattaactgccgcagcttcaaactgagagaagccagtttacaagaagagaactatatgagattgaaaattactaagagaaaaaagcatattataaatgttcacaagagaggctacactatctcttcctaaagctgcataatgctgtagaccattgcacgacccatcctgcacatagaaatgattcaaggaaaaagtgttgtttaagaattcacagattctttgaaaagagtatagcacagttgattcagatcccaatggaaagaccatatctggtgaaaccaattaaaaacttaacaaaagggaaaagcaaacagtctactgaattccccaacctagaatcttctacagaaagcaagtgtcaagtaactaaaaagagtaggataactttggatataagtttacggtgcttacctgatgaataggcaagtgggaaattactgaataaggtgaagggcttttcaaggcttgtgtcagaataacacatgcagctaaacactgaaacggatcttcagcctttaaccaccatcgttttccatgtataggattttcagctgaatccattatatcatccaaatggttttccacgaaagccagacgggcatcatgtgagagcttttcaacaccacctgcatagaggtttgctaaatgtattttcagccaatgcaagcctgactttccaagtggtcgtccttcagcaaactccagggttccacggcaaagatcagaactcagatgattcagatgaggatgcattgggtatgcacggcctctaaagtcaagattgtgagggtagtagaatccttcttcgtccttcatttttctagccacctgcaatgataacctttagtctatatcttttcctagttaagtgaagacggaacgaaaagtcttaagcagtaagaatgtatttcttacagaaagtttgagctcaacatcacatcttagagaatgcctctctctgttaatcttgttggcctttcgagcactccatttccaggactggagttcttcaggatcctcagaggatggtttttcgggtatgggaacctaaacaaaaataaaataagaaagagaacaaaaatacgtcagacacataccattaaaacctataactatgcagattaattaactcttgaaatgaaacaatgaaaggtaaaagttcagaaatctcataacatttctagtgacttacatcttcacgattaactaagcctgcaatgttgcctccatcagcccagagcctttctaccacatcaagtatattcctattcaccctccacttggtattcccaagtgtatccaatgcctattcaagttcaatttcggaatattaatataatacattacctgagagcaacaacaaaatatatattacaagagcgaaataccaatgtacctcaaatactctatgagcagtcttgtgactaatatctttcagtgcatcttgctgctttttggatccatgagtacgcatgatataggaaggtaaaaacaagtaaccacccttgtcatatctgaagaaaatgtcacagcatttgcatacgtaagcacgagaaacccatggctaaaaataatgtgtggttctcaataatagggcatgattcataaggggataaaatctagagcaaaacaagaaagagtttttcaaagcataccctttccatctctttggtggcactaacatcggaacataaggaattaacatatgcttagcctgcatgagacaaaaaaacaataaaagatcacctaacagctcatgaatggaatgataaaaaagacatcttaactcacagatttatctagtcctgcaagaaggagcgagtcacattcaataactccatacctcctcaccagcttagacctgcaagttccagtgataagtaaactctacaccataagcatatatcccagttgagaaaaaaacaactttcttgcaatagacggttctatacataaaacaactgactagaaaaacaaataaagagatgggtactcattttgaggatttctctcaccctggatatttagtcacagttttaaacctgtgtctgaatgcaggtcgaaactcgggtatagagtccccagactgggtcaagggaggttgcacataagctgcttcgatcaatagttctagcagacggcttccaagctgaaatttagcataagcccaacaacaaagatgaaatgtgtcaataccaaaggcaaatactataatttcactcaaacgaattatcaaagccagaccttagcttgtgtagctcgtccccatggtttggtaccttcacttttcaccacttttaatgcgtcaataatccttttccttcgaatcaaactattaacacgtttcctaagcaattgcttttctttcaattcctcttgtgagtcccctgcattgttcttcctagttctcttcaagaagttatgaatcctcacctaagagatcaaccaaaaccacgactcaacacatcatttctttatagaaacaaattgaattactactcattcatacctcctgctcaatagctatgccaatactaacagcagcttgaacaacttggatacacccatcttcatgtccagacataaccaaacccatcatcttatgcatcacaataaccgccattttatcagcaggcaaaagctcaatatgaggagcataagctgctctaaccttcttgctcttattcttctgcaacttctgctctctctcaatcacatctttcaaaggttgaaaccatcccaagaacatatgtttcacataaggcaaattcggagctagattcttctcacacatctccttctccaaatctctgtactcatcaaccatcctctcccacgcttcagtctcttccttcacttgtcgtctcctcaaggaatcaaatttcctcttatcgatatctttccgctcgattttcaaagtctgatcaaccattttactcaaacccttgagaaacaaagcagagatccatggtgggtcttgcataaacagtcttctccgaccagaaagtccattcctttcgacaggattctcaagctcctcaatcaagcttgctcctttaatggttccagcgtatgaagagtcctgattctcgaagctctcgatgagattgccgtggaagtgaaccgaattcgaaatgggtttctcgtgaacggagagggaagtagaagaggaagaagaagaagaagaagaagctgaaatcggaagtgagtggcgttcgaagaaaggaagggttttgcggcggaagagggcggaggagggaggaggtttaagccaggtgacgagagaagtttggtgttggaaatgagaggttgggtttaaggagagagaaggagaagccgccgcagcggaagccatggaaggaaggtgaagatagtagaagataaggtattggtcttccaatgaacatttgaagaagagaaagaaattttgagagcaaaacaatccaacaaacctctctaaaacctctactcttttgtttttttccccaaatatatcaaaaaaagaaaatccattgtatttctagaatgatttataaaatattcagaaaaacaaatacatttaattaaaaaacaaaatatagggaatatgaacattaaatatccccttgtattttttagttgatgttttagaccatgtaaaaattaattagtgttgacgaaatataatatgttgattgttttatcatcagtagaaaaaatgcaagaaccaataagctccctaaatgattctttaatttgtgtgtaaaactcttaaacactaactaaaaatacagaaggaatattattttgtttgggtaattattattagccattagatgatcatccgcgctacgctgcggttttttcgaattttttcgtattgtttaatttaaatataatttttatttatctaattacttattcatgcaatagaaaatttatttctaatgcccttttcatgatgccctttttcaactctaccttttttttagtcatttttatttctactctctttaaatttttaatgaccattttacccctatttgaaaattgtattaggttaacaaaatgaaatattaatatttttcgcctaaattattccaaaataaatttctcgccaaaaaaatttcggaaaaaaattcccgccaaaaattttcaaaaaacaacacatctgctataggtttttttgcgggaaaaaagtttggcggaaattttttttttgcgtaaaaatttcagtttccaattacatgttcctattagatgaaggtaatttgatcattctgttcaagagaagagatatttttaaaaatggacaacacaaaagggtattgttgcaaaaggtagtaaaaaaagggtagttttgcaaatttccccatgcaataaacaattatttttagtattaaaaatattttttctaataacattctcaacaatgcatcatacagataattcataaacaacgtttgtcttaaaccaatttaacaaagggtagtgttggattctagaaacctaagaatttgatgatggagctccttacgtatctttccttcttaatgatttattgtataaatatcaatttaagataacaacttactcaaatcattaagtaatccacgactattatatactcatactttgagtttggattaccaaaaaaaatcttccagtatgagaaaactattaaaatggttttattgaaaaattatgtaatattaaaataaatttagtaatactacaattaaatatgtaaattaaataataaatatatcattaacctataaattagaagttgaagagcttacattaattatttaatagacacatgtcaaatgctaaagtgatgatgtgtcaatcatatggagagaagagttggctaactttcatatatatgatttgaattatggctcgttgtaaaacaaaaaaaagcgttaagttaattagactcggtttagagatgtaaaccgtaaacaagtagatataatgttcggatgaaatttgcaagcgaacatatacttgttaatgatggcgatgaaaacactatagacgaatttagtacatgactagttgctcgagagctcgtttctacatgttgaccatgacggctaaccttttagcactcgaggattaactgcaacatgccaatatgccatcaccaactacgtaaaccaccagcgccaagaggaataattcgaattatattgttacacgagagttgtaacgggacaagaccttaataggtcaaacccacgggttgaaatggtcaaaagcatactctagagacaaacactatcaaaagacccactttatggacatacagtaagaattggcaaggtcatatgattggttctaaaaaaggtcttgaactcttgatccacatatatcatctggcaccccaaaataagatcgacttattctatgagattgagtcgctcctatctaggataggtaagctcataaatcttttaactatatggcactatgcatcaaacgataaagagctccctcagctctcagttagaaagaattatctcttatcacatttccaccaaatctcgagattggatcttacactacttccggctaacgatctcgaacttagaaaaacaaaacaaaatgtttagatgaactataagtttagataaacccacttaccgaatatcttgtgccaaatataccgcttgctactacaagaaaattgacattgttcttgccgacgaagttctgcaccattccaatgatactattgcaaagagaagatgggctatgactgtaagttgtttcttgtgtaaccaaacaaaccaaaatctgcaacgtaaccagaaatatatttttaggtaaagaaacataggatttaagcaagattttacagtaataaataatcgagaataactagagatctttgaaatcaagtatttctcatcttaaaatccttaactaatttttacaaatctaaaaaattaaagcaatgacattccattgtaaatactctataaactaagatctgtttcctaatttttacttcaaaaatgtatattagattattaagacattagccaaacttcaacggctaacataaatgataaaaacaattttttgctataaaagttgacgaataggaggaacactctcaacaaaaatgagataaattatgacggtgtccgcgtacgatacggaccagattgtgatgattaacaacaccacgaaagacaaaagttcgatattggagctacaagttgcatcaacttatttaaatccatatggtaattaacacttagatataaacaaagaaggtgtggttgtattgtgtggtgggctaggttgattaatttatcttatatgatccctaaacctcagtgcttaagtacccaaattatcgaaccaaccaagtcatcttcgtatttcttaatcttaatttattctaataatcatcatgtatataccaatttgatgtatatattatcgtcgacatggatgccacatcggacattgttgaggatacaccacccctgtagattgttatgatatttcctcattattttaacgtatcgttccactaatctcactctcaaaatccaattacaaacgtgactatttagtctaatctactctagtaaacatataatattaattaaaacccaaaacacatgatggagttaggccttaagctagttattttagatgacatgtaaaccaccatacaaaaattaacacaccttcacgaaaaaaagttaaccacacggcaattataaacgaataaatgacgtggcggagtcaagttacacacgcgttcacacaacattggttgactttataagtcaaacatcataggcgctaaacgtttcattttcttcaaacgttagttaggcacaaactataaaagagatactgtctctcttcgattgtataatatatgatttatatatatgtgtatagtcaaacaccatttctgattctttgttgtctcaaataaacacacacacaaaaaaaaaaaaaatggattattgttctttgttggttgtctcgttcttgatcactgttatgaccgttcttgcttctaaagagaacgatcatgagctaataaaaagtgatcaaatctctttgctttctttcaaatcatccattgtttcagatcctcaaaactctctaagcagttggatttcttcttcttcttcttcgtcttctatgctcgttgatgtttgtaattggtctggtgtgaagtgtaacaaagagagcactcaagtaatcgagcttgatatcagtggtagagatctcggcggcgaaatctcaccgtcgatcgctaatctaaccggtttaacggttcttgatctttcgagaaacttcttcgttggaaaaatcccacctgagataggttcattgcatgaaacattgaagcagctaagtctctctgagaatcttttacatggaaacattccacaagagcttggtttgcttaaccgtcttgtttatctcgatcttggaagcaaccggttaaacggttcaatcccggttcagctcttttgcaacggctcttcttcatctctacaatacatagacctttccaacaactctttaaccggagagatccctttaaattaccattgtcacctcaaagaacttcggtttcttcttctctggtccaacaagctcaccggtactgtcccgtcttctctctcaaactctacgaatctcaagtggatggatttggagtcaaatatgttaagtggagagttaccttctcaagtcataagcaagatgccacaacttcagtttctttacctttcttataaccatttcgttagccacaacaataacacaaacctcgaaccttttttcgcctctctcgccaattcctctgacctacaagagcttgagttagccggaaacagcctcggaggagagattacttcttccgtaaggcacctctctgtaaatcttgtgcagattcatcttgatcaaaaccgtatccatggctctatacctccagagatatcaaaccttttgaacctaactcttctaaacttgtcgagtaacctcttgtccggtcctatcccgcgtgagctctgtaagctaagcaagctcgaaagggtttatctctcgaataatcacctaaccggcgaaatccctatggaactcggggatattcctcgccttggtcttcttgatgtttctagaaacaatctttctggttcaatccctgatagtttcggaaacctttctcagctgagaagacttcttctgtacggaaaccatctctctggtactgtccctcaaagcctcggcaaatgtatcaatcttgagattcttgatctctctcacaacaacctcacagggaccatacctgttgaagttgtctccaatctcagaaacctgaagctgtatctcaacctctctagcaaccacttaagcggtccaatacctttggagctaagcaaaatggatatggttctctccgttgatctgtcttccaacgaactctcagggaagattccgcctcagctcggaagctgcattgcattagagcatctgaatctttcaagaaacggtttctccagtacgcttccttcatcattaggccaacttccatatctgaaagagctagatgtgtcttttaacagattaaccggagctataccgccttcttttcaacagtcttcgactctcaagcacttgaatttctccttcaacttgctctctggtaatgtatctgacaaaggatcattctctaagctgactattgagtcttttcttggagattctctcttgtgtggctctataaaaggcatgcaagcctgcaagaagaaacacaagtacccttctgttcttctaccggttctgttatcgttgatcgcaactcctgttctgtgtgtgttcgggtaccctttggtccaaagatcaagatttggaaagaatctaacagtgtatgccaaagaagaggtggaagacgaggaaaaacagaaccaaaatgacccgaagtacccgagaatatcgtatcagcagctcatagcagctactggaggtttcaatgcttctagcttgattggttcagggagatttggtcatgtttataagggagttctcagaaacaacacgaaggtcgcggtaaaagtacttgatccaaagaccgcactggagttctcggggagtttcaaaagagaatgtcagatcttgaagagaacaagacacaggaacttgatcaggatcatcactacgtgcagcaaacctggtttcaacgctcttgttctgccactgatgccaaatggaagcttggagaggcacttatacccgggagagtactcgagcaagaacttagatttgattcagttggtgaatatatgcagcgatgttgctgaaggaatagcttacttgcatcactattcacctgtaaaagttgttcactgtgatctcaaaccgagcaatatccttcttgatgatgaaatgaccgctctggttacggattttgggatttcaagattggttcaaggtgttgaagaaacagtttctacagatgattcagtgtcatttggctcaacagatggattgttatgtggatcagtcggttacattgcaccaggtacacaattctcacaacatcattaaagttttactaagtagtctcattagtctttaaactaaatggttaagtcatttatcatcagaatacgggatggggaaacgcgcatcgacacatggagatgtgtacagttttggtgttctcctgctagagattgtaagcggaaggagaccaacagatgttcttgtcaatgaaggttcaagcttacatgagtttatgaagtcgcattaccccgattctctagagggaatcatcgaacaagcgttgagtagatggaaaccgcaagggaaaccagaaaaatgtgagaagctatggagagaagtcatattggaaatgattgagttaggattggtatgtactcaatacaatccttcaactaggcctgacatgcttgatgtcgcacacgaaatgggacggcttaaagaatatttatttgcttgtccttctctattgcatttttcatctcaagaaacacaaggagaagctagttcataatggttaatttcttgaatcaatatttcatgagtttttttttgatgattgtattcattcttttaatgattttttcttggattcttgagttgaattgaatttttttagaagttgcattttgtggactaattaaagtcttgttcaaatcaaaaataaaccaaccaaatcttctatttcagattcattggttaattttttttaagtgaaagatttttggtgggtattctgtaatcatgagatcatatcttatgtatgtgctatgaatctagcaatgaagcttctcctaatcttcagttgccttataatcttatcacaatcctttttgcctaacattggattaaacaaacaaaaatttgtagcagagatttatattgtaagtggaagctgatgatgtctgcttaataaataataatctatccaatgtcttgatgattagtcctttattagttcaatatttctaaattaagtaagaaataatgggtgacatcaacatcaaacaaaggtcaacatgccatcagatttgtctctttctgccatcttagatagaagtgatgagccaagatataatctttgtgacacatcttcagaagttttttacttgccttatcgtcactaaagtagttactgtagaaacatagatttgtcttaacgatattaatgggcaaaagaagatggtataggacaagctagaagtgatgatgaggtaggtgcagaagacaaaatgaccaaacaataatccttagtgcttagaaaatccggatccaaacacgaagagaggacggtatcagtgcgtaaaagagatgagatttgcttcttgagtgtgacatccaacagagaatatgagtaatcacaaagttgtggtgaactgaaaatgttacctccattgatagtgacacaacaggatttaataaaaaaagttttcggaattgggatggtgaaagaaatagtgtttggattaggctctagaatgtggaaagctatgatgacgaataagcatgagaaaaagattatgctaagataaaactagaagaagtttggtctgatagctacttgtaagttgtaatcttatcagtttaccggttaacattggttctgacttcaaccaatcaaagaaagggttataactccaaaccaaagacaatctaagattggtgattgtgagattttagactttctttggtgcataaattaaatgacaaagcatccaacaaaactcttgtggttggtaactctcactttcatatgcttcttttatttcttcattttgtccaccaaaatatgataaagtatgatcaaaaccatgagatatctagaaaacagaagaagatctgtttctcaaagtctcaaactttacacaagatgtgaatcttacttcaaacaaaaaacgaatgcaagtacaatatttaatgacaaactaatcttaatatatcactataaggttctcaaggtttgtatacttttctataaaatcaactcgctatttgtagatatcataactcgctctaaagccgtcaactctggacgagagggtgtctcatagccagaagtaaagcattgcctgtttcaatgtacatgccaagatttgttagtacttaagaactatctaaaatttagtgaaagaagttaattttaccatacctcttgaacagaaacaatagctgagtcataactaaacattgcagattgcatagaacttaactcttcttctgattttctctgcagattcatattttcttgacttactccactagtttgagctggctctttgttgcatctctcctgctctagtcgctctactcgctctctcaaccgctgtaactcggcttgatactctgcatcatttgcagaacaacttcctagtgcttgatctctcttgatacttttatctcttttctgtttcaatgatttcttggacatctttttcaccaacaaatcaggtttacacatacctttttccccattcttagtttcagaaacagaagttgtctcctgcttcaaaatcttgtattgatctcttacagaatctcgaaaatctgtaagctctttcaactgctcatccaccttcttgatcttttcccaattcaaatctaaattcttctcatgatctcttcttgaatccaagctctgctctataacacccttctccacaagaaccgtctcattcggttctggagacggtgtttgagatctatcgcaaaatctaatacaatcctcatcatcaagtccactccatcccaaactcataagcttacatctataagcatgtaagtcacactcaagattcttgatttcaacttctttctggtaattcaaatcctccaaaagctccattgacaactcaacatgagacattctctcctcaaccattctcttgtactggctagcttccatagcaagcaacgctttctcgccttgtagcctaagtatcacagacatggcttcactcgctgacgtagcagtagcttctctctcagcatccaactcttcctcaagtctctgcacatcttctttcatttcataaagagctattctaagatctgtggtggactcaaatccacgcgtttctaagctatagcttcttcctaccatatctctgattgcaaaaacactatatgcaaaatttctattcaataaattacttcaaccactatagttcgtagaatctgaagtttttttttgtctaagcttctagagaagaagaatcttataaatgaaatcaagaaaagaatctcattataccttgtaaatttgtagaagaacacgagttttgtcgacgagctagtccccaaatttggctcagaaagatgtcaaaaaacacttttgtggggaaaagttttgtgtattaaaggacacattggaaactaaaatgttaaaattcgacaaaattagacctaataaatggaaaaagcaaaaaaagggaaatagtttcattcacacaagccacgcttgaccaaaaatatcatcattatgctttgtctatatcattaaaagtagaaagtttcttaagttgggccatttataaactcattaaactctgagaaagtaatagtcctctaaaataattatgagatacactaccaagaaaagagctggaaatattaatgaaactttgaatacttaatgttactcattgaattattagaaaaaaggaaagggttaattagtatattatagtcagtcaaatatttctcaaaaatactgatgaaactttgaatgatgaaatctgaccttctttttggcctgggacatatcttcttagctttcatcccacaaaatgatatttgaatcttcttcttttttcttgttgaaatctagttttcttctttaatattattgaaaagttagttgacactttttaagtcttcaacggctcattacgagaccaggtatttagttcatgttgggctaccaaattactttcattaaaagacctctagattgacttaaacaaaaaaaaattatgttagtgtttttaataaaattatataaccgatatttcaattgcttccttttaagttttaacttgtgtggctcacaaaagaaaacaaaaaaaaatcataccattagttcattttgatatactcaaaaatcaaattcaagagttagttttttgtttagtgaagactcctattgattcccattctaggttacatatgacatcatgcacaatccaaagcagcttgaatacatatttgactggaggattggtttcaaaataggttttcgtttatttgtctctcgatgtcatactctgcgagaacgtcatagatgtagaagaaagtagacagcaaactattgttcccaagatgtgatacaatgttgatgatgtactctatacaatgatgacaccaaggaaaccatattttcagaggagatcataacatgaagaattcttgatgatggtgagatgttgaatgtcgtgtaggtggaacaatcaaaatgtacctcacaaacctcagtttcagagagaggatggttttcatattatggcttgcacaaattccagagagcaacaatggcttgttgtgcacgacattcatggagatggcttaattagatcaaaacagcccatgtaactatctgagatttgttctttaattatccctagcaaaaatagtataatgaaccttaaccattttatcactgacaaatttttgatctccagagaaacaaaggaatcaaaaggttctaggttttctttatattcctccttcctcacaatttcttctcttccaaggaatcgatatgcatatattctgctttagtaatcagaatcatttcaatcttgaaaatgagattcgacaaatcaagtctcggtttcaaataggaaatagccatggattgtccaaagcaaatcaagatcacatacatcgaaacgcaagatcacagaagcttactaaacaatatcttcttgctaaaacccacaagaaggggaagcccgtgaaaaatcaatgatgagaagagtggtaacacaatgagcaagagcacccataactacaaacacatggaaaatctgatggctatgtcccgccatatcaaacgctccaggcttccatctctcaggcacacggctgacataaaacgttgctcccacaaaatacgacaaagccgtggcaatctcgtaaccgagggcgatgaagacattagggtgatcccagtaaaggcaaagcacatgtgtagcaggtatcacagcagatgatcccattgcaaggaaaagattagctctgaaaggtctaaaacgcggcgtagagagagcgggagagaggagagtgatgatagcgaggagaccgaggatcgagatcgaggataagtagagtaaacggaagttagggtggcaggagaatgcgtagtagattggtgcaaagaaagaagcgacgatcataagtgatattcctgcgtagtccaaacgccagaagaagacgttgaaacgttttgagtgacaagcaaggaggtgtgaaacagagctgcagattaaacaacccattgctccgactaagtacacgagccacggccattttggaatagcttctccttgtgaggtaagacatgagatgtgatgtgtcacgttcgaatcctgttacagagagaatcttttaaagcttagtcatgtgaatgagtaaagcatcattctttattctttcctcaaaagtttatgtaatcttttcaaaaagtttggtgggttcaaagctcaagagagaagaaaagatccaagacatatcgaaaacaacaacacatggtggggggcaatttaccactactttacatgattagaaaatgacaaagatttgatcccaacaaaaaaaaaatgaatattgtttttgaatattgtcacaaccatattatttttcatgtcacaaccgtattatatctttcaaacagataataaaaatttaaacagaagaaatatatttcgttttacattatcgtaaaaacgatataatatggtaatgtcacataaaacaaactatataatatagaatactcagcattatagtattgacaatgtcacacataagataagataaggcggcaattaaaaaatatcaaaagaatacaaaaaacttacatgaagcagagtctgattgcttgagaggcaaatcctcactctatcgtcaggtccccgaaaaaagccaattatatattattagggtgactttaaaacaaaacagagcagaaaatgacgattttaacctcggtggttcgtacccggccatgccgttaaaaacgccggcgagactaatctccgtcgtctccaagcaactcaccaccgtcatccacagaaatataccaaatccaattaaatgcctaacgattatcaaaatctccacaaaatcaatttcgaaacttctataaaattacgaaaaaccccctttcgaaagaaatttaacgtacgtccaaatgttgagagtctcgttgtgccaagagaaagcactgagaaaagtatctttgagagaccattgacatcgataatggttgtgtataaactcgttgtccttcaaatactcaggcaagtcttcgaacttcatcaatctccttacgattctcgtctcttcgccgcaatctaaccctttccaatcggtaaccgtcaccatcgccggagatttcttcgccgatcttcgtctcttcatgctccggttagtttcgttttctctctagctgcggcgaatctgtgtccctcgctatctctctgtgtttatatatggagacgaatcctctttgaatgtcattgagggatcgtgaccgtccacgtgtaagatatctctgacgtggatttttattagtggatgaagagattttgcttggtgtgaggttgagtacacgtgattaattgttttttcccgatgtgccaggttttttgaatcatagcgacaagtgggaagatgagaaaatgcataaagtgtggtgcgtaaaaatggcctacactaatctactttagatttgagattacatatgcataacttaatctcaactatagtcaccaaccaaactacaacacctggacaaaactcataaaatttagattaatctagattaagtccccaagtcattcatttcatgtgtctttgtgtgattggttgcatggccaaattacatccaagaatttcttacaactggaaaataagtcaagaaacgtttcagttcctgagatagttacagtcattctttttgtcttgaatccttgataacacaaagaaaaaattactgttttatacaaattaaagcggaataaaactgatacataatacaacaagctcatttacacatacatagctatcacatgttgaaatttaggaactaaaagagtatttgaatgcattttcaaaccaatatgtatcaaatacgtaccgccaccaaagacgtttattacaaaaccatatattagaacattacaacgcacgaaagagtttttggagaacgttattacaaacacatacatatgcttgacaatgcttagagagaggacacgtgttcaacgagcgcttctgatgacaactctgggcttgtttctacgacacttttccattaaccactcctgcttatgcgaaatgaagatatgtccaatcactaatccgcaaaacacaccaggtccatacgctattgctgctgatgtccagttaatcacttgctcttcttccggctctgatactttctctaattcttgtggtctaggatttgggacatgagtttttctgcagatatcatcgagaccataaagcttggggttgtccatgaatgaagaacagttttggcgttgaaattgtgttccgcgtggtattggaccttcgagattgttgtgggcgaagttcatggttgacagaaaggagagctcaccaagatctcggggaatctgacctgacagctgattatgagacaaatctaatgcctcgagattcgtcaaatttgccaatgattgaggtatatcgcttgtgaaagcattacccgacaagttgagaaaacgtaatcccttcaacaagccaatggattcagggatctttccataaaacttgttgcttgaaaaatcaatggatgtgaagtcttgcctgatcttatcaaactctctatccacacctttgttcactatttccattgaactagtgtaagtaccaaaataagggtcatcataatcatcttggatggtaggatattcgaagtatacaacatcaatttctaggtgtaatgtagtcatttgaagccagttggaaaaatagaaagctgggaaggatccagtgaagtcattatgtgagacatcaataacctttaaatgttgaaaccaagtagattcgtggaggtgatataacggcccatagaattggttggctcggaggatgaggatatctaaatatggcatagaacccaaccaagatggaaacgtctccttgaatttgtttccttccacattcaaaagtcgcatggatgtgcaattgatcaaggtttttgggagtttaccttccaaccggttgcgggtaacatcaagtgtgtataaacgagtagcattgagaaacacatctggaagaatcccactgaaattgttgtttcgtagattaagcacttccaaagaataagtgatattccttaaacatagaggaattgagccactgaagctattgttggacaaatctaaaatctccagcaatctaaactggcagatccaatgtggaaatggtccttggaatgaattagaatcaagacgcaaactcgcatttgtgcttgatctagaacttgtgatgattttccaaaaccactcaaagagttgtgagaaagttctagcgatgacaatctcaataagcaacctgggacattgccttgcaacttattgttggaaatatctaacctttcgagtttgagaaattgagatatggattctgggatttggccatcgaaattgttatcagcaaggtatagactactaagactagacgatgatggccatgtattcccaaaatctataggtcccttgaaattgtttcgcgccaaagtaacccattgtaacgaaggaatcttgaacaaggatgttgggaaaggcccggaaaatgagttgttacgaagatctaataatacgagattgagaaatttagatatggattcagggattgggccatcgaaattgttatcagcaagactaagataagaaagcctagaagataaagacgaattcccaaaatctatatgtcccgtgaagttgttgttactgtccctcaaattaacccatcgtaacgaaggaatcgtgaacaaggatgtaggaaaaggcccgaaaaagttcccacccccaaatccctccaagttgtggaatcggctcatgtccggtataagctcgggttcaaagtcattttctctgatgtcgagttggatcaatttcgttaaattggcaaatgaaacagaagatttgccacttaagtggtttatggaaaggcgaaggtacattagtttggtcaagtttccaattgaagatggaacttgaccaactaatttattttccgaaaggtcgagaaaggtgagatgagaaagggttcctaatgaaaaaggaatctctccatagagattgcaataacgaagggttaggttttggagatattggagtttgaaaagaccactatttggttttaaagtgttgttaagattaacgccaagaagataaagtgaaatcacctggccatatttagcatcacacgtgacagactcccaagaacagcaatcactgctcttgttccatgacctcatattttcaagtctccggaagttcatatctgctcccggaaactcgtgtttgaactccaaaagagcatccctctgatcatggcggcaacggtgggccgtaggagaagcaagagtgtgtggaaaaaacgaaaacaaggagatgaaatacaaggtaataacaacaataccattaaaggaataagattggcttggtatcatcattacttcttttgtttttaagttttagtttgtgtggttgtgataggttataattatggcttctgatctctctttataaagaaccaataacaaaaatcagttgtggagctcttgactttcggtgaacactagtactgtcgtcaactctgacattgacccatcacacactctattgacttgacattgtcgatttcattatcttttttttacaattcaaaaattttaatgccttcattataaatttttaaggtataagttttcttggaatttcacaatcaaaatcgttacaatagagaggagcatgagtaacttgtgccagaagaaagagtgtttgggaaatgtgacatagaaaacgaattgggcattttcagtctcaatggtttaggagacgcaacatttccattggactttttgacttgcaaaattcttcatatggaagagtcagtgaggcgtgaattaagggtttcatgaaagagacaaatgatcaaaaaaaaagaaaaataaccctcaaagacgtttgttacaaaaacgagttattggagattggagaacactgatgggaaatctttacaaacttatcagtcttcttatcctctctaagtctttgtgatttgtgccccatagaccattgactcattccttccaccttatctgccacatactgtttcgacttgtctcattcctgaaaaaaacgttcgttagctaatttcataggttaattcccaacaaaatttatcaattggagacaaaagggaaaattcgcagtgtaaaaggtgtcccaatggtcagcatcggctccacctattacctataggcaaggtaggcaaatgccaagggtccaatattaatttcagaaaaacacttaaagaagaaaagtccaaattttcttaacttttttttttactaagaggtttaatttttgtttggttttgccataggttatatcgagacggcactgccaatggtactatcagacaatgcctagaagttctacctaatttttaatctcttatctcacaacttccttaaaatctgctcgtgagtaacaaacatagtcacattcccatacaaattaaattctcctacaatagtcttgcactactctaaaatgaacaccttatcattataattgcagtgtcactacgatatagatggaataatttgagtatggatacatatatatatatatatatatatatatatatatatatatatatattaataaacaaaaaaacatgggaaatgaggacatgaaagattgctatgttgataacagaaacagtgggtttgattattgcagataactaaaatttgtagtgaaatggagtataaaccttgacttgctttctttgttcacttggatcccaaggcaaacaataaacacaacataaaaaaaaagattgtttatacattatcaaggtataattattaaatatttgtctgttgaaaaacatgctaaactggccggcaagagctgctttttcagagccataaagccatctaatattcagtgcaaaaccaatgaaattctacttatgagattttggccattccactgaatctctctagttatccattactaccagaaagtaaatcaagaaacaaagaacaagatatgcttcatttcctcacatgattaagaggggaaatttttgtcttgactccttcgaaatactcagaaaattgtggatttcattcaaataaatccacaaatcatttcgaatcaaatttctggaatttccgaaagaaatcactagaatagtgaaagcaaagacttttagcatcttattcagacaatttagtaattaggtctaaacgggctacctttttagtatttttcagatccattattagtagtcaaatctaaacgggtcaacctattatatagtgtctttaaacgggttcgggtccacaaaataagaccgtatcctttcaggccagcgggctttatgtccatttcaacatcatgtgtaacatgtccaagaagaaagagtgtttggagatattcggcctctgtggggaagcaaaatttctattgacttttcttataaatccaatggggaaacggtccttggaatgaatttgactcaagactcaatacacgcattggagctctatctagaacttctaatgactttccaatactactaaaagagttgtgagaaagcgataaccatgtcaatcttgataagcaacctggtactgttccttccatcttattgtaggaaagatcaaggatatagaggttatgtaactgtgatatagattttgggattgtcccgatgaaattgttgtttgtaagactgaacattttgcgcttcgaaaatttagatatagattcagggactgagccatcaaatttgttatcgccaaggtgtataccaataagcctaggcgatgaagttgtattcccaaactctatatgtcccttgaactggttctcccacttaagttgttttcactaaggtctaggtgcctaagatgggttaagtttccaaatgaatatggaacttgacctactaatctattattgagaaggttaagttttgtgagatgggaaaggtttccgaataaagaaggaatctccccatagagatagcaagttgaaatggttaatttttgaagatgttggagtttaaaaagaccactatttggtttcaaggagttgttgagaaagacgtaattaaggtaaagtgaaatcaccttgccagacttagcatcgcacttgacacccttccaataacaacaatcactgctcttgttccataaacttaatgatgcaaaataaggatctagcttggattgattgatcggaaactcgtgtttgaactcttaaagagcatccctttggtcatggcggcaatagtgaagcgtaggagaagcaaatgtgtgtagaacaaagaaaaccaaaaagaaggaatacaacgtaacaccagaaaagcaataagattgttgtggactcataattactttctgtgtgtatgtgtgtgcagtgtgtggtaagtaataggttatgactatggcttctgagtatgcctttaataagaaaaaaggaaaataaaaacacttctggagtttagttcttgacttcgagaacaatctatcgtgtgaactcgtcggacttcttatcctcctaattcttcatgcatctctgctcagtgatttgtgccactggtccatatagactactgattgactcattcaattctaaattatccaccacatacgtttctttttgtttttgtttatctaccacatactatcttgacttgaccttgtcgatcgagttcattattttttatttcatttttaatattctgaaaactatgttcctaaaaacatgaggtacgcagtttcatgaattccaaaaaaaaattgtcgattagaaacagttattaaaaaaatgtaaactgtatgaccttgcagtagtaacaaacttagtttctaatctactaagaatggaagaaataaaaactgagattgctgataaaagtgtgtgacaagttgctgttattatgagacaattgttgtactcttgagctctatgtatgtttacaataaaataaaagtttatgtctacatatctcaaaatcatcacaaaatttaaaaggaggaaacaaaagaacgaaaaagaacaagatttaagatacagcttactaagaaggtgattaaagatcaatcgattttaaccgaagagtagataagcctggtgaaccaaaagcatgcgtagaaaccaattgcaccagtaaagacgaagaatacgtatgaaactatgagcatgtacccaaagtagagcactgcagagacgagctttgtgatctcaagtttggtgtagaagtaaaagactgcgtaaagaaagaggtaaaccgcggaagagcctgatgttaagtaagatctccaccaccattgatagtcttcactacacagctgaaaataacagaggacgaccgtgatctctgcgcaagtgatgatcaaaatgatgaagacgatgaagaggaagccgaatatgtagtagaactgatgtagccatattgaggtgagtatgaagaagagctcgatgaagactgcgccaaatgggagaatgcctccaatcaaaatggagaagattgggttcatgtaccaggcctgtgttgggatctgccgcgggatcttgttggttttcactggatcttccggtgcaggttttctgaaaccaatgtagccaccgatgaaaacaagtggaacagagataccaaaccagaggacaaccaaagcaaacattgtaccaaatgggactgcaccggatgatttttgtccccagattatcgcattaaggacaaagaaggcgacaaagacggtagcgggaaacatgaatgcggttttcagagcgtttcttttccattcggttcctcttaacgtcttgtagaggcgtgaagacgcgtatcctgccaatagtcccatgaaaacccaaagcaaaagcatagccgtcataagaccaccacggtttgaaggagataaaaagccaagacaagcaaagatcatggtgacaagaatcattccaaagcattgaactccagtgcctgcataaacacaaagcaactccgggtttgttggcggtctgaaaacatctccgtgtaccaatttccaacccgtctcttcgagggcctcttcatgactctctaactgattgtagttggaaatatctcggtagagtgttcttagcatgatcatagcgaccataccagagaggaaaagaacaatcatcatagaattaacgattgagaaccaatgaatctgatcatcagccattagaaggtaagtgtcccacctagacgcccatttcacctcactttcctggaagtcaacatcatatgtgaagataatctcgttcccttcttcaacctcctgaggagactcagagttagtgactgcacgctttgtatgcggatcacaagtcgttaaccgagccttttcattccattgaccttcatattcatgtttgacactgcatcgagataaaatcagtagatgttagtcgcttacacaatacagagtcaaagtccttaaatcacaaaaagctacctgaacggcttgacttcaaagccaacgattcttgaagaatcggtctgtatatctctgtgatacctaacagtgaaggtcaagtggttgtggataaaatacttctcctcctttttctacaagaaaatcaaataaataagaactctttccattgaaacatattcagaaaaggtgatgatgagctcttacgccagcaaagattcccttgagaccaacatggaaaccatgctgatacactacaacattgtcctgatctggcctttgcaccggaacaactaggggaaggttgtccaaaatcctgcataagaaatcaatcttcctcataaaaacagaagaaaaacaaaacacattcagtcgaaggcgacaaaatcaatctcctcacatgttaactcgatattcatcagcaatcttctccttaaacgcctttgcggttttcttatcaagcttcacacgacaaaccgcagcacacatctgcgattccctcattttaaactgcaacaaagaaacaaacagacattaaaaacaactcaacaactaccacttaaccaagacagatagagaaagaaccaagaagaaacaagaacataccacaaaaggagagttctcaattcgatcaccacgaagaacttcaccgagattctcagcactatcaacaatatgttctggacgacaataaggaagagaataataggaatatggaagctgagtctttgtagatgtcaatttattaactttcaccatcaatgcatctccctgaaaaacaaaaccataactccaaagtttgaacctttatagataatgaccattatacattcttctactccaaaagctagattcacacagaaacaagtctaaacaatggctaatacatatagactaatgaaacattctctttaaacacaacactcagtggtaactgaagatcaaaattacccaaatctcataaaacagagccatagatccaattttaacaagattacttgatcgattgcgttggatctaaatcagaaaaaaatctagacccagtgtgaatcaaagctctaagaagaagctgcatttgtgaaatacagatacagagatgattttatgtggctgaccatttggaaatcttgtggagcgacgccgggaaggtaaaatccatggatatggacattgagggagaagaataagacaagggtgaagatcaaaatccgaactttcgccatggatttgctcgatttcgtcttcttcttcggagagtgaaatttcttaaatgaaggagaagagagtgggaagaaacatggcaattggacgatttatggccgttggatattttagtatctcgtttgatttaatcaacggttgagatttcctaagttggagctgtcggtgattcttcttcttaaggtaatgaaatatcaaagtcaacactttttaaggtaaaaaaataaaactttgaatagacaataattaaaatcaaagtccaatttacgagaaatctaatttttaaataaggaaacaatttttttttttttttgttaatttaagtagattagatgaaacttgtaaatgtagcaaagtagaaatgagttagtgtggaggatacgaaataattatgaaaaagtattcaaagaataaaagaaaaaaatggatttaaatcaattagaagacaaaatccatttggtaaatgaaggtgacctcttaactattctagcagattatgaaaccttacacacaccagcaaccaccttgacatataattaaatgtacattaccaataaatacatgtaagaaaaaagcacacacacacacaatacaaatccgcattagataaatgtaagtctttcttttacagactgttttcaaattgaaaacggacggttttcttctggagataactagtccggtataaatgtaagcatataatagtaatcgcggaaactaacttctattatttctattctattataaagtaaaagcagtcgttggcaacacaacattagaataatttgaaaagataagaaaaattaacatagcatttgatatgggccaactctttgatgatattgggatcgggaacatggactttggtattctgaggtataatatagttttcacgagtaatgtaggcattgtcgtgtgcaccacctccgaaataaatgattacaaaagttcagtattataaaaaatggtctaggcggtcgtttacactctatctaggcactagactctcaggtaacgcctaaataatcgcttcgattgtctaaaataacataaattgccatattttctatgttcacttgtccatttattatcaattttagggtctaaatgattgttgtggttaaggtggacaaattcgtttgtgtatttgaccacgttttatttaccatttcacaaattacttctgtgtggatttaaaaaagaaaactgatgcggatcaaccacataccgtttttacatataaatagagttggttgcgacggtttgttgtctactttaaaaatagttcggattaaaccattgacggatttatccatcttaactgccgtaaccattcaaacttgtgagatgagagaagtaacaatcaaaaataccaattgattgctcgtatcttactagaattactgacaaattcttctataaatgcaacgtttctcaaagaatctcaaggttaagcttattattgacacttatataaacttctatttatttatttatttaagtaaataatcaaaattgcatgagcatgttggctataagagaaaaattgcatgagaatggcattcttatagattgatgaaattcgattggtcgtgattggatattctatacaagaaaaaaatattgatacgctgaggtagtctaaatagattatagtgtttcatagaactaagaaggaattatcgaaagcagtctaatacttttttaatctttaaatcatttgaggttcggggttcacgacgagtgcaacgaacatgaagacagactttttttcttcaatttcatcaaactttttttttctttctgttttatatgcttctgcttcatcacccttttttctttgggttttaaatgtttctggttcattcaccttttttctatgtggcttaggtgctcctatttcatctcttagttttctttccagttttttaggtccttttggttcattgttagcttgttgtcgtttagatttagcatttttcaacttaatgactttctgatattccagattattagatctaaaatactcggagtcaaacgaatcatatcagtaacaaaatacaaaactagtcactacttgcgaatcaatcaaacaaaaataaaacatctaatcatggatgtgtattcacaaataacttaccattacaagtgtgtagtttacaaatgctctgttttgacttaaaatcaaaagtttcgacgatttaattttttttgatgtggtcataaaaagaaacttgaagaaatagagaatgattcttcagatttcttgttaagtgatcgtgaaatactttgattagggtttttgaactgcacaaaaaattctaacagagacaaaaggattgaaatcctctatgaaaaaacattatgttttaaaagagttgatttttcttttacgggcaacccacaatctgcgacgagtttatccacatgaatttgtgatctacgatggatctatccatgaagcccactaatttatatacaaaaaaaccaacgtccaatccgcctcgacagaactaacccaacagattttaatgcctaaaacatatttaagtttatttaaaattgttaagcatttttaaatctatttctaattaaaagtcacaaaaaacaaagctaaaattctaaccgttcactaataagacattaatctatgaaataaccactagattacgaaacattttcgaaatttgttaccttttacaactatctataaatttgtgtgcctaaagcatggacttcagccgctttagccaagggcagagctgaaattttcgttcatcaatttacattctagaaagaagtccaggacacaataatggttgagtcatgactcatgaggtggccagtagaactgttcccttctttgatgtgtttgtgtcacgttgataacgggtggacattttattggttttgtgagataaattgttgaaaatcgtagcgaagcaagttgatagggttcaatcatatctcgtattatctactatatataaaacattgtagaaaagtaaaatattttcatttaaaatattataaaacagagaagaaaacttatactatttgaccaaggaaaaaaactacctactcacgacacgaccatcacgtttataatgttaatacacagttacaccatacattttttcattgtagttctatacaataatatatcatcgtttgatctaacaagtattcgatagatagtgggaacttttttttcccttttggccttatatttaagaacatggagcctgtgtttctaaaattctatctaaaaaagtatattttgtattgatcatatctgaaattgcatatattgtaaaatattgtgtacaaaaggatccggtccaagattaaacacacaatacttactgagactaaaaggggctaaaccacaagaacaaatccttgaaattgcaatggttaaacttacaaaaaatatgtctcttattaccagatcttaatattgtttaccgaatttctgaactaaactacattttttgcccaaacaaacaaagaactaaactatatttattcaagtcaagtcaaataattgcatgcaggagacaacgcaaaaagatgaaaaaactaaaaattcagagatgaacatcgagaacacaaataacattatccaaatctcattaggatcctattaaccaaccacaaaaacgtccacttcataatggtctaatagtacaatttgtttttatgtagaagtaaaagtgaagttcgaatattcttacattgatttcaatcatattttgctactatagattaacatgtatacatcagcatacacatggtccaacgattgagtctatactgcacaaaactctggagatgaatctaaactttggttcgaaattccggcaatgtatggaaaagaatattcaaaaaaataagaagaagcatattgaccgtttcttgttcaatatactagaaggtaaacgtcaaaaatgtcagcatgttttctttcaaaaacaaaaaaaaaaatgtcagcatgtggtcagaactcagaagttcttaccaagaaaacttaactaacagttaccatttagaccctaaattacttatgttgtatttttgtccgaaaactttgattaaaaaaataaaggtgtaagacgatgaaaaagaacaaaaaattatattgtcactgtatctttcaaaatcattctaaaatgatagacatgtatcttagcgcctccaaacttttccactctatgaaaagttgttcttcgttttttttttttttttttttttttttgtcaattgttcttcgtttttgaacttctattttgcttcgttttgatatttttatgttttcgtttatatttttgaatttttctttctttcgtttgagttgaagaaaaaacagttgttattatgtaagaatttaaataacaatttcaaaaaggaatattttttttggtcttactaaacgtctgaccggcatgtttgaaatatttcagtttcttgttgcttcttgatttaaccatccgaatctatctaaaccaactaaccaagtgattgaacaagaactaaaccgatttttctttgatttgatctgaatccttaagtagtaaagtccaaaacagcaaatactaaaactgaacacaaactggagccgaactgaatcccgaaggaacaggtgttacctattccgacaacgataaatctcctatttttgggatgttttatctattgaaaagttgttgaatgaggatggtctaatgatttttccggtctctccttacaaattacacttttatggttcaatccactcttaaaaaataattgaagtcaagattttcagcctgtggtcggaaagtccttacacgaaactgaagtatgatataaatttatctttagcatatggtcgaaaagtctttacaataaacttagttaaatagtagtaaacatatacactagctacacgtatttcatctttattatggtcacacatactacacaaccaacaaaaactacaagacgataacaacaaaatgtctcttttctccttccccatctccactgagttgcttccatggcttctcctacttttgattcctccacttcttatcttctttcttcttcgttcccctaaaaatcttccaccaggtccaccaagattacctatcttaggaaacatccaccagctcggatccctccctcaccgcagtctcagagatctctctctcaaatatggcccagtcatcaccgtctatctcggcagcgtccgtaccgtggttgttcactctccggagacggcggaggaagttctaaaacttcacgactccgagtgttgtactcgtccaaagctatctatcaccaaaagctttttctatgatggacttggtctagggtttactaaatggggtgattactacagagatgtgcggaaactctgtgttcttgaacttttctccgttaaacgagccaactcgttccggaacataagagaggaggagctgagtcgactcgttaactcgttttctgactcggcgtcatctggatcttccgttgaccttaccgcaaatttggctaagttcgtcgcgagctttacgtgtcgaatggcgtttggattgagttttcaaggaagtggaatggataacgagacgtttctggagctgttcacggaggcgaacagagtgatcggaaaattcgcggcggcggatatattccccgggtttggctggatcttggatcggatcagtggtcttgattctagccggaggaagagttttcaagatcttgatacgttttaccagaaagctattgttgaccatcgggagaagaagaaaactgaagaccgtgaagatctcattgacgtcttgctcaagttacagagtcaagaaaccaaacttggttcttcaagaatcaccgatacacatatcagagctattattatggtaagttttcaactttggttagttcggttcgataccataattcttgttcgatttgggtaatttggtttagaaatttatgtatagtttggttaatacaaatatcaggttacagaactttgtccatgccttatttagatgttgaattataatttattgagttcatgtaagcatttttgttttcatttcaggatttgtttgtagcaggagtagacacatctgttatcactttggattggacaatggcagagctttcaagacatccaagagtaatgaagaaagtacaagccgagattcgtgaacacgtaggagacaaaggtatagtgacatacgatgatctcgaggctctagtctacatgaaaatggtgatcaaggagacttggaggttacacgcaccgagtcctattctgattccaagagaagcaatgactaacttcaagatcaagggttatgatatttaccctggaacgcgtattcatgtcaatgcttgggctattggacgtaaccctgatgtatggaaggatcctgatgagtttataccagagagatttgttgatagcaatgtggaaactaaagggacaagttttgagctgttgccgtttgggagtggacgcagaggttgtcccgcaatgtacgtgggattaagtacggtggagtacacattggcgaatcttttgtatcattttgattggaaagcgactgaggaagtgagtgttgaagaagcacctggtctcactagccacaggaagcatcctcttcaccttgttcctgttaatgtcatcaaccgcaagctttagagtgcggaaagcacaaacatttagttttcgacgaataaggcttaataatgtttctgtttattgaatagtcgatactttctgtttagctttcaaacaataattctcattacatgaataaaactttggcttatctatctccacacaaagatttcagaactctgaaacttgtttgcgatcaaagaagcaaccagaaggagattcttgatgtggaagcaaagctaacctcacaggacttgatgctccttcttccacagataaaattccagttttaaaattcatatcagtcttaacaaatccaggacaaaccgagttaacgcgaatctcgggatgtttcttcgctaagatcctcgtgtaagcattcaaaccggctttcgaaacaacgtaagccgacatgactttagcccaatattttgtcttagccgtatcttctttcagatcattgagaagttggttgatcacttggtcaattcttacctccgttagattctctgcgtcactcaggatcccttttgcccattcgtttactaaattctggtaaacatttaacaaaagtaagttaaacactaaatagaatttccctgccaacatcttgcaagcattcttacctttacttgacccatgaaggatgatacgttaatgattcttggagaatcagataactgcaaaagtggaataaacgcctcacacattctctttggtccataatagttaatctttatgcattcctcagctagctcataagtctcagtgatagtttcctcccacttgaaaccttcctaccatgtataaagtaacaagaaagcattaaacttgacaaagatttatcgaaaattatatcacaagatacttactttccctgtcccagctcttaaagcatcaacatcagtgattacaccaccaaccccagcattattgatctgtcaaaacaatcaaaagatcactcagcattacacaaagactcttgcttttatgacttgtaacagaggaaactaatagtaccaagatatcgagttttccgaaatgggttttcacaaactcagcaagagaagtgacactaacaggatcagagacatcaagctgatgaaagacaatgctttgatcagaaatctcaagctctttcttcaatgtctcaacagcttcaagcccttgtttctcatctctagatgtcaaaataaccctaatccctttgtttgctaattgtctgcatatctcaaatccaattcctctattccctccagtaactatagcatatctacaaaggccagaactaaaatctaataaagatcagaactaaattcaacaactaagtgaagattgagtcataccttggtgattcctcagccatttttttctaggttttagttcagacaagaatgtttcaaacgaaatgtggaagccaatgaagccacgtagctcagaaattgatgttcttggaaaaggtaaagagtgagtggcccaataatctcaccattaaatagttttggttatgattttagtgttttcgttaacataagcggcctataaagaatagttaaaagaaaatagcttagacataagatatataacaaaatctatatatatgtaaagctgaggcgatatatatggtaatcagaatgtgcagaacaaacagattaaattatgtgatgcgacttgttggaggaaaactcattatgcagaagaaaaacgctacaaacagctcaaaataatgtgtgaataatgagaaaataatatgttatccagtatgaatgtttgaatggtgaaaaagttttaaacaaatattttatagtttttaatagattaatttatataatagtagtaatttgaacaaatatttttcagttgtgttattttatcgcaattttttgttaaatatatgattctgaaaacaaaaattatattgtatgattttgttttttttcagaaaactgtaatccgaataaataccttctattgttgaacgtaatttttttataaatggttacaatcgtttagtcgaaagtttagtttattttacaaatcattgttttttttttttttgacacgatcttaataaaaccgtccaccttcttctcctgaaaactttacattttcaagagttggactaattcatagaaaatcttacattttcaagagtcacatacgcattttcattgtatattgaaaatgaaacacgctgagagatataataatatattaggttcacatatgaattttcaatttttcattgcacgcgggacacaccaaaccatttttttgacctggtttcatttataaaaaagaatactgtaaaacgtgggcttcatttatctctctatatatatatgcttgaattacattttgaattcatagatctaaatcaacccaaaatgtataaattcgtcgtttgcttattaactttgagttttctcttgctctctggactatcaaacacagcattggcccgagtacatcatgagtcttcaaatccaagtaatttttatattccaagcaattttgtatactattcgatttttgtttaatttgattgtagagtattaaatatacacttcaaattttccgttttagaaaacagagatattgaatgaaaatcgaatgttatatagttttggttataattccatgtttgcaaatatatctttaaaatcaaagaatatccatagaaaatagtcgtcaattttactttatcatcgcagtttgaatttacgatttgctcattatatatgaaaactaaaactgaatcattgtaataatatctcttcatttttggcttttgtaataattattccggtatggacatacagttctttttcaatttggattggttcctctagatacgtaagcaataaactggcataacagaaatgatttgttaattgttgcttcttttttttctgttttgaaagaaataggaaacagggtttgggatcaaaagatcttcaacaatgtgaaggttcgtgtacttcccagtgcttcaaggcgtggacctgggcaaaccggttagaaaatcagtactaaggaacaaaaggagtattaagtagaatagttacttcaaaatattatcaaaaaaatattttattttatgatagataaaagtcatgttttgtaaccactcatatgctgtttttttttcaaaagatgttcaattattgcatttgacattatggttcataaaatttgaagtggttaccgaaaaaagtaatgaaaaggagaacccaatgttgaagacttcaaaagtagaaatttcagacagtatttttgcacgactaaaacaaagtaccactttattcaacttttgacgattttacttttcataacaagttaagaacatctgaaaacatagtaacttttgagaccttattaaaaaccagcaatcatttcaacacccgaaaaactctacagtctctccctcacgctctctaggtttcattcacgaagatgaattcttctgtacccattcaacaagcgtagcaacaccaaacccggtcccagacttcttcttctcgttccacaccggtccagccatgtcgatatgcatccattgcaccttctcactcacaaactgccataccacagaaaatagaggatggtttagttactttcaccgacgaattttttgtcaaaaacatgtatgtatagcctctaaagggactttgttttcacctgtttcaagaagagagccgcggtgatggatcctcctgcccgcccgcctgtgttgaccatatcagccactccagacttcatcatctcccaatagctctcttccagtggcatcctccacagcttctctccactcctttctgatgcagcaatcacttcctttgcaagctcgtcgctaggtgtatagattcctatcaagtaatgaacacagaatgatcatcatgagccaattttggactcaaaaacgacacaaagattgagtttttctgcagggtttttgagctgtgtacctgccattgaagttccaagagcaataacacaggccccggtcaaagtagcgaggtcaacaatctgcaagatatttgacaatgtttaactgaaaggataaatttaacagaaacaagctcctttagcttctcatatcaataaagtaatgcaataccttgtcgacgccttggttacaagcatacactagagcatctgcgagtgttagacgaccttcagcatctgtgttgttgacctacacacaccatcgccaacaattagcatttcataggaaaaacagtaaaagctcaactctgagggggaaaaaatcatcagatacctcaatggtctttccgtttgaggcagtgatgacatctccaggtctcattccggttccactaatcatattttcacaggctgcaacgatgaaatgaacctggttgtggaagacgaatctgttcagttcggttaacaaactatagctttcaaaagaatctgatgggagaaactaacctcaacaccaggaggcttaatctcaccaatagctttcgcagcgccaagaacagcagctgaaccgcccatgtcgaatttcatgagctcaattgagcagccaggtccagtcttaatgttgtagccaccactgtgtacacaagatattcaaatcaacaaccactaaaataacaaagaaaagataccagctcgtaacagagtaaaattcaaagcaatacagaatgattagttacctgtcaaaggtcaatccttttccaacaagagcaagtttggtcttaacagagccattcggaggtttatagacaaggtggatgaagtgaggaggattagccgacgcagcagcaacagctaggtaagaacccatcttcaactctttgcattgctcttcgttcaagatgtttgcagtgaagacatcactgtacgtagaagccacctttgctgcttcctcagctagtacagctgaaacgatacaaaaatcaaagcagtttaggaaaactcagcgaacaccacacaaacacgaaaatatttgatttcataaatgacaacaattcataccaggagtaagcacattggcaggagaattaatgagctctctcccgaaaattacaccgtaagaaacatcttcagcatacttcagcttcttttctacctcagccccagttccaaatccaataatatcaacagctttcaaagatggtttctttgattcagacttatacctaccatcttcaaataaaccaagtactatgcctatccaaaaataaacaatgagaccccaaatcagttccaatttccaaaacagtactaaacaagactcgaacttgtgttatactaattgaagttacctgaagctaaagctgatacagaactaagcttagattcatcagaaacacttgaagcaagcacaatagcagcactagtagattgagaagcttttgaaactgtagctacagcttcaccaaggctatgaaaagccaccggagacgaaacagactgtccaagaccgatcaaagcgattctctttgatcctaaacccggaagcctgagaacagtcgattgaccaggtttcccagtgaaatcttcctcggaagagacttgagctaaaagtccacttaagtgagcatcgaccttgctcaagatcggattctcaaactttgagttaccgtctttggctaagtccttctctgtcacaccaactacgagtatgtctcctttccattcaattacatcgatctccttcgcagtgaacgagatctgcataatcgtcaccaaaagatcaaaacttcaaactcgaatcaatcaaaaaatcaaaactttgaactaaatcaaaactggattccatacaaaatcatttcaaaatcacagtgaaggaaacaaaccttgtgaggctcagtggagttgggttgagtgagaccgagagtgtgagccatggttattgctattgaagagaggtgttgtgtgattgaactctgaaaaggaagacgaaagagtaaacaatgaaaagttaggattggtctttcaaaggcgtatatatagaaggagaagttaggtgtgatttacacatgtgtgatgtgtgttagtgagtagctcaattaggcttgaacattcggacttcggattggattttattacgataattcgggttttggatttgtagggtaaaatagggttttggattttttagacattcggactttgaatcggattttattagggtaattcgggttttggatttgtagggtaagacatggttttggattttttagatagggagatttcggaaggtactgaatatgtttcgatcggttcgttttggatttatacgggttcggaatggttctcgaaaaaaaaaaaatgcgaccatagaatcgaaatatgttctgattcgatttttgaatcgaaaaactccaaaaacctaaacgatgtatatagaaaaacgctccaaatgatccttaaaatccaaaaatatgtgtatatattgttttgtgttttttgggtttacgtttggattttattttttggtataatggttgggttgtaggtgtttttgagtatccgtttgggtttcaatttttttttaatgttcggatttcagattttaccagtatataaccgaaaatcgaaacatataatttaagatctgttaggataataacaactttttgatttggaaatttttttgggcgaatttcttaagagaaggtcgaaataataaaagacaaaattatagtagaagttgttattttcagcaaccttatcaaacatatctctatgagatatgcaaaagttttagcttcagtcgtgttgaagtgttctaggtggaatggtttaaatgggtgaaagggcatcgatcatgctatcgagctagtcacttctgactctgattttgggcactgtttcgtcgatcgttggtcattttgtgccgcctttgatatctgatcaagtatccacaaatccgtccacaccaatattttgaaggtaaaccccatttcctaatatcaaaaatactattcgccgtccggaacattgacaagtacacggcgtaccagtcaaacatggagcctaatcaattcaactattttttctattttgttttgtcgacaatggtctaattgatacatgagaaattaggctgtatgaccataaaaatttaataattcaataactaacttaaaaaaagttgactacatgattatgtgtataacatgtaatatatactaatctacccatttgttcacatgtcatatgtatcttttgattctttttctgaattttgtcttctttttttcttttgtattttgaagtatgatcatttttaattgtgtttatgttaaaattttaataatattattgttactaataaaatttcacattatgacttttactattttaaaatcattttttattttattagttttttgttaataattaatattaatagaaataaatatttattaaatgaacattgtaattataatttagtgttaaaaaaaaaaaatggtgacatggctttgtttgattggatgtttaccatgatgatatgtacacattaagagaacagaaaactcttccataatatatattagttaataacactaagaatggtgagagtgatattaacatggacatggttccattttcataatgcgttttttgaaagacaatcgttacattttcaactctttttcaatgttggaaaccgcaaattaattaccaaataggcaaataaatactcgaacgagtttcattaaagataattaaagccagttcttcatttctttcatataaatcagacaataatcccatgttattttcatcacccagttacaaacttgaaaaagaatcacacatcagaatattttaatttttcttttgttttgccataagaatatatatcatgacgataaagaatgtactttttgttctagtaaccatttgtgtagcagtttctgtaaatgctcaactacagcaatatccgattattttctcaaacccgcttccatttctgcgctcgactggtatactaaacctaccagacgtaaaaaaatgtttctcgtccgtgaggaatgttccaggatgcttattagagatctctcaagcttttggagagaaattcggtcacatgatgcccgcttgttgtaaggctttcatggatagcataaaatgcatgccaaatattctatacagtgtacttttccctcctaatttgaaagaacaatgtaatcaggcagggatccactaatttgaaagaacaatgttctgagggatccacgcctagtaaagaggtggtagttgccaccacttaaaaaacagtttttaatataactttactaaatataaataattgccaccgtaacaatttaactctttccatgatcccatttttttaaaaataaaaatatttaagatggccaaaagctcactttactagtattttataaataaaagcgtaatttgtaaactaaatctaacttaactaattaaaactaggcttgggcgtttaatctgaaaccgataatccaaaccggaaaatcggattaaaatccgaatcgcattcaatatccataggtaccagattatacttgatccgatgcaatattcgatatgtatccgaatttgtgtcttttgttgtaccagggacatgtccaagtttgaaaatgtagctaataagaagcttgaggctggcttgttttcactatcttccaaaatttttttactactttcgattgaattctgctacttttttaatttttaggatgttatggtttaccttcgctttaaaactttgatatattggcatcgttttatgtctcactttggtttcccaactctatggtttgctaaggtttcatgttagttcaactagtcatttcagttttgttttgcggttttcggattgtttggattatgtttagattttttgtttaaatcagatattgaatatcacatgcataccgattcaaaatccgaaatatccaaaccgaagtcgaaccacattctataattatttttatagatattaattagaatctatttccaaaaactcgaaatccgaaaacaccaaaccgaattcgattcgataatcaaacgcccagacctaagtaaaaccctacaacttttgaatccaattttttttgtcgttctttctttttcctcctagtttttctccagacgagaactccctggtaagtttttgttctttgttcaattataactgtttatttcaaattttaatcattgttttttcattaatcattctaactgtagaaatctaaggacaagtttgtttcttcttattgtagaggtttagttctcgtgtgatttgatgatactttacacatgtgctaataatgattttgtgtttagttttccaaaataacgttgttgcttcatttcgtttgaatttgtgttggatccgacccaagctcgactcttttactatttaagagatgttatgccacattttaacctaagatttaagataggtttatttcgctgaattgtctaagagtttagaaaggcaatatagacctaagtttttactatttaagcaacgtttgctacattgtcggtgaagatatccccccctctagcaagtagcaacattagtgaaattgttttatgaatccatgtatctttacgcagtcactacgtatgttgtctcatatcgatcgaagtgcatgctttcaatatattcattagtaagtagtcccgatgggaacagtgaatttggtagattagggagattgtgatctatgatgcttagggtagaaatatatgtttctaatttgaatgcacttaaaactagatttgaatttgctaaagatattaaaaattgttatttttgtgtgtcgaaggtgtttgatgcacagtttaggccaatcctaatagtgttcatgatacttggtcaatgagaattgatgattaaggtgagattagtggactaaaatggacctgttgttttcattgccaattgatttcctaatttgcaaatggaagttcagataaattgggtgtttaatagagcaattaaaaccatggaagtaatctaccttatttaattgtttcacccatgatccatagcttatcttatttgctaatctggtttcattattttgtttaatcttattgtttagtagtttcccacttttcctttcgaattgaatgtctctttatttacttgtttacgccatctatccacctagtttaattagtataacatacacttaagtgtgttatagtctaattctttgtggattcgatcacaatattgtgctacaagtgacttaactgtactcttcccgttttacaattcatatttaaaatttgacggacctatagtccactcaatttagctggtattgtaaatgtctacaaaatgaaagtcatgaatacattttcacttcaaagtacgttttttatttgtttgagatgtcaagcacatgtttatttcgttgttttccaaataatatctaggagaggaaggttatcaactatgatctctatctttctagtttgtggtcacgcatgagtgacttcaccggtcatttcataccttcgactttaacatatgacactgtacacgtaccatgttaaaaatgtgtggatagtaaccttttctagaaacccccttatttgatttttgtatatcgaatgacaaatccatgtgatgtgacctaaccataataatacaatgcaaaactaaaacgtgattcggccaaaactatgacaacctaaaaagctagagagtaatatatatagacatacacctgaagagttacgtatagcataataatacatttattcaatatggccactctcctgcaaataggttcaggtgtgatttatagtaatgcccttaggaagacgcttcgacgtcctcagtcttctacatgcatcatagtgaccgaaaccacaccatgtaataagtctcccacagttcagcgtcgttctgcgaactatcagccttctcgttgggaccatcaccatctcctctcggtcgaaaataaatttgcggtacgtagatatcccgtaaacactctaacttttttacagtgacgtaatgttgaatactatgttgataaattttttgtaatgttccatatattgcatacagaaagataaaagggtacgagagagagatttgttgaaggaaaaagtgagaaagatgctcaatgatgagcaaaagacttatcttgaccaattggagttcattgacgatctacaaaaactcggggtttcttatcattttgaagcggaaatcgacaacattttaacatcttcttataaaaaagatagaacaaacatccaggagagtgacctacatgccaccgcactcgagttccgacttttcaggcaacatggtttcaatgtttcagaaggttattatcttaacctaatataataattgtttatatatatatgttaaagttttctcatcaatgtggaaagataattgcttatatatatatgttaaagtcttgctgtctaaaaaatatctggtcttatatactagtgaattttgtattacagatgtattcgatgttttcatggaaaattgtgggaagtttgaccgtgatgatatatatggtttaatatctctttacgaagcatcatatctttcgacaaaattggataaaaacctgcaaatattcatcagaccttttgctacacaacaactcagagactttgttgatactcatagtaatgaagattttgggtcgtgtgacatggtggaaattgtggtccaagcgttggatatgccctactattggcaaatgagaaggctatccaccagatggtacatagatgtgtatggaaaaagacaaaattataagaaccttgtcgtcgttgaatttgccaagattgatttcaacatcgtacaagctattcatcaagaggaactcaaaaacgtttccaggtaatattaaaatactaaaattcatataactactttttaagatatcttaaatctattttaaactctttttataattatgacattatcaagtacctaagtcatatattaacttatcaatattgttagtcagtttgagatgataattcatgaacttctgtataattttaattgaaactcgtacgtacgacacatatatatccatttttgtcaacaacatgcattctaccgaatataaacatgggtttgtcgcgcaacactcttacaaatcacattgttaagttacatggattggtcacacaaaaatatttattttcgagatcttgaataagtatatataagatattttaccttcttaaattttcctcttgctatatatgtggtgtgaagctggtggatggagacaggtttaggtaagcaactctactttgcaagagacagaatagtggagaattatttctggacgattggacaaatccaagagcctcaatacggatacgttcgacaaacaatgacgaaaataaatgcactccttactacaattgatgatatctacgatatctatggcactcttgaagaacttcagcttttcactgtcgcgtttgaaaagtaaagacccatacactcttaattttctacttcaacttgttatttcgtaatataattaattaaatatcaaataagatttattttttgtcaaaatatatcatagaaattaaaattactgattgaattgtctatatatatgttgcagctgggatataaatcgtcttgatgaactccccgagtacatgaggttgtgttttcttgttatatacaatgaagtcaatagcattgcatgtgagattctcagaactaaaaatatcaacgtgatcccattcctcaaaaaatctgtaagtgtatatatatactcttttcaacaaatacttttggtgaatctattgttcttacaattatttacaaaaaaaagataaaaaaattgatgtaaaaaaaaaaaattcccttgacattttttattatttttaataatttatacatctcgttaataaatttattaaaacataaaaaccattcttacataatttcaactatggatactttacataacttaaaccatggaaacttgcatgtgttggtacctaatgctaaattttcaattatcttaaatttagtggacagatgtatccaaagcgtatttagtagaagcaaagtggtacaaaagtggtcacaaaccaaatttggaagagtacatgcaaaatgctcggatttcaatctcgtccccaacgatatttgttcacttctactgcgtattctccgaccagctctctattcaggtcttggagactttgtcccaacaccaacaaaacgtcgtccgatgctcctcctcagtgttccgtctagccaacgaccttgtaacctcaccggtaaacaatctcttccaagtataaattttttttttcgctcaaatatattttaactaatattcaaatcatttgtcaacgatcccttcccttcctgtttatacctaaccgtctcttttaatcttttaaaccaccaatataattttacagctttgttaaaattagggtttacaccatccctattctttagaatcgcatgtaaatattcatataaaatgtgaatgtacgtgtatataggatgaattggcgagaggagacgtctgcaaatccatccaatgttacatgagtgaaactggagcatcagaggataaggcgcgttcgcatgttcgacagatgatcaatgacttgtgggatgaaatgaattatgagaaaatggcacatagctcttcgatactccatcatgattttatggaaacagtgataaatttggcacgcatgtctcaatgcatgtatcaatatggcgatggccatggctctcccgaaaaagccaaaatcgttgatcgtgtcatgtccttactcttcaatccgattcctttagattgaacttcatattgattacattaaatatcatatggttttttgaattctaggacatagggttccatgaaactatatatatttggtgtaattttataacaaaataatatatattatatgtttatgaaacatcaacattacaactttaacaagagctggtatatatgcatgaacaaataatttcaggtaataacttttaatagatcttacgagattggggacccaaagccatagttccactatatatgttgttatacatgtgtcgaccacagataaacatgttaatcacttgaccatcgtaaatcggttggccttgtaaacctctaaaataattaaaacatgttaaccactttacacttcaaagaaaaaaaactggaatgacacctaaacaatttttgtttcaaataatatgtaagatggttataacctatgatatctttttgtctttttctatttttggtgacgcatgacttcacggatcattggcgtcttcttcgacaacatgtgatatctttcactatcgttcatcatgtccacatgaagtacgtcattagtagattctttttatctagagacaaattaattgtaaccaattataataatacaattaagaaacgttttttgcggacaacgtaagaagcttgtacaatattatatatagagacaattacatctagggtaagtggtgtaatacttttgttcaatggccactttactgcagataggttcagctctaatttacaataatgcacttgcgaagactcttccaggtcctcaacctttcacatgcaccataatggccaaaatgacacctggtgagtctcccgttgttcctcgtcgttccacaaactatcagccttctctttgggaccaccgcccatctcctttttatagaaaataaatatgtggtatatatatgtaagtaattaatacctgtataatattaatctataatgaggtcatatatatattgagtactatattgttgatagctatatatgttcaatacacagcgttcaaaaagatgaaagtgtgtgagatcagagagagagagatttgttgaaggaaagggtgagaaagatgctataagaagaagaattatctcgaccaattggagctaattgacgatctacgtacataaacttggggttcccaaaaataagacaatactaataatacgatgtggccattggttttaacttttaatagaaaagtatctttattcgaatgcacatctcaaagcttggaacgtttcatatttttcattcgacttgtgggagccatatattgctggccacatgacagcatgatacgacatgtgataacactaagatcacacaaacatttgagacttaacctttacacagataaacacatgcataaccaaatcattggcctaaggtggggtcaaaactcaaaaggtttcacaagccatcgatcgtagtatctgagaaatcttccccattaaattttttgaactgagggatctgcaacgtaaaaaaaaaccagcttaaaattatgttcttattttataactctaaattatattgtgtctaaacgttgttaggagtgggtttctttaatgttttcacatgtaatacgtctaaagtcatttggatgcaaacatgaaagttgaagatcaaataatatggagaaatatcctagcatggtacgtattcaatgagaagatgccaaccgttggatcaaattaaaagttggaaaattatagggaaacaagtgaggtttaatttagctctggtttgagttctgtcagaccaatgaactaaatgctaatgctatagtgttattgaagaagttgatgcgaaattgagatttgttttgcaaaagctcgagttcaattgttgaatgagcatataaataactcctgagaaggcagcatcgatcagtccacctattggattgatcgtttcacctattggctttaacattccaactattggatatatcatccagcaagagcatcatcaatcgatcccttgtagaattgattgatcatttttcctaagggtcgattaattgatatgattgttgtgtttataagtattcgtaaatttcaattcagatttatcaacaacatgaaatgagatgacaagaaaagtaaaataataatcaacgattttactcctttaattcacctattatacaaaaagtgatttttagataacatgcttttattttatgtgactttctaatttatcaaatgaaagtaacaagtggtgtcacttgtgtcacataattttcacgaaatgtatggttttcctctctaccatatttatttacgtgaagtcgtgaacatctaatttgtcaaaatagattaaaattttcgtcatatgaactgattacatgttattaattagtacgtactctaaacattagtacatctcttcagaaaaaataccatattttatgtttttaagtacattaaataaaatagaatataccgtcacatttcatttaaagggtaaagtaaaaattagtgtcagacattattaacaatatggcaaatagaccaaaaacgtgccaaaaaaacaggtaagtgggtcattgtcaatttgtcatggcaataagtaacgaatgaaagatctcagccgttaatagccagttagcgaatccgacggctatggatccgtacattcctaaagctcatgaggcctaatcgcatgctctgtttcttcaccggaaaaattgcaacttaaagaaaaaaagaaaagggatttaaaaaatgacaactttcaaagacgataatcctcagtcaaatttatcagtcagtgagtactctcttattaactctcaaatttagggtttttttttttactctgtttcttctttctcaattttggttgttacgttatgaaatttgactctaatcctcgaaaacttcagtaaatttgaataattttgttcttcgtaaacaatcgtgtggcttttcttgttgaacaattctgtttctgtacttagggctgggattagatcataagaatctgatcaaagctgagatttttaagattttgttggtaacctgagacgattttggtcttgattcactcgagaaactccaaaaaagttttgatttttagtgttagattcagatagtgtgtctagggttgttgattgatgaaatagtgaatagtgtttcagataactttgcagagattctgagtcaggttttatgtttcaggactactaatggatgaaacaacagaacgcccaactgtttcgttttcatattcaaattggatatcaaacatcaaaaaatcaacacgagaagcttacgaagcaaagcccttttcacattggattcttttgttcttcagtggtgcggcaatgctcatagctttcccagcttctagtctactctctcgtctttacttctccaatggtggtaaaagcaaatggatcatttcttgggttgctgttgctggatggccaatcacttgtcttattttacttcctacatatatctttcaaaagatcaaaccaacacctctcaatacaaagcttgttctctcttatgttgtgctcggtttcttgagtgctgcagacaaccttatgtatgcttatgcctatgcgtacctccctgcttcgacttcttctcttctggcttcttcgtcgcttgccttctctgctttgtttggctatctcattgttaaaaacccgctgaatgcttcggttatcaactccatcgtggttataaccggtgctatggctataatagcgctggattcaagctctgatcggtacagttatataagcaacagtcaatactttgcaggtttcttttgggacataatgggatctgcgcttcacgggctcattttcgcgttatctgagcttctctttgtgaaattgcttggaagaaggtcttttcacgttgctttggagcagcaagtcatggtttctctcacagcttttgcgtttaccactattgggatggttgtgagcaatgatttccaagggatgagtcacgaagctaagagtttcaaaggcggtgagtctctgtacactcaggttcttgtctggagtgcagtcacgtttcaactgggtgttcttggggcgaccgcggtcttgtttctggcatccacagtcatggctggagtccttaacgctgtgagagttcccatcacgagcgtagccgctgttatattgatgcatgatccaatgagtggcttcaaaatcctgtctttggttttgacgttctggggattcagctcttatatctacgggagctcgagctcgaactcaagtactcaagcttcctcttcttcatcctaatatgcgagcttttccactgtctccattccttgaagtaaattattccttgagtgtgatcaaataccattcgtgtaagataagattatgttccgggtcaagttgtagttgcaaggtcttattatctctttgtgcaacaagttttatgtgaagcaagaaggtttgatatagaggttaacgcaaacaagcttatatatacaacaatgggaaacagcaaaacattggaaaaaggtaaagagataaaactttcaagggaaaaagaacattgttgtagagattcagaaagtgatgtttcactggttagattttggttcaatatctttaagaagaccaactacttgctgcatacttggccgctttgaaggaagatcagctgtgcagaggtaaccaatcttgagagcttcttccatctgttcttctgagcctgtctcttggatttttggatcaatagcttttgatgcttgattcttcctaactaaacttctaacccaactcaccaagttagtatctttctcatcaagataatcatcttcaatcggctttttccctgtcatgagttcaaacagaacaactccaaagcaatagacgtcagatttcggtgttggcagctcgtgttcgggttgcaagaactcaggagggagataaccaggtgagccatgaataatctcatcgtccaaaccatttccaaaaactttggctaaaccaaaatcagataatcttggttcccagttctggtcaagataaacactactagctttcacatccctatggattattggcggtgaacaaccgtggtgaaggaaagctaatgctcgggcagttccaagtgctatcttgtgcctaaaccgccatgtcgccacagggccttcagtccctatgttttgggttccattgtcagtttcttcttcccatgtatccgtggtccaatcatctgttgtctgaactccaaatggcagatcatgaagcaggttttgcaagttaccgttttccatgtactcgtaaatggcgatcctttgatcaccggctatgcaatatccagttaatgggacaagatttgggtgcttgatccttccaagaaactcgagctctctagctgcttcttggtcactaagagttgagccatgaaccaaaacttttacagctacatgtatcccaccggggaggaaacctcgataaacaggaccaaatttgccgtccgctaagagagtgtctctgtcgaagttggaagttgcagacaagagatccgaaaacgttatgttcaacaatggcttctcaaagataaccacaggaactgcatttgcttgcttcacatcagccacccatgtagtggaatctgtttggaaagagaatggacctgaaatgctttgttcctcctttactgagagatctttggcttcaccggatttagttttccttctgcagccaaatgctacaaaaatcaatgctcctatgagtaaacacatcgtagaaagcgtcactgctaaagccagcttaagtcctccagtgactgatctttttctcttgaaaagtgctgggtttgcagcgatagggcagctatttgtagaaccaaagaaggatctgttcagagtttcagctgagaactttccggaacaaaatgttaagttgttgaaagagaagttgaatctctccatccaagggagcttctcaaggatagacatcggtatctctcccgtcaaattgttcctcgacacatcgatagccacaaggttcttgatactcaaaatcgggatatgtcctgcaagatggtttccagaaacatcgagtgtactcaaatcactcagctttgagatctctctaggtatgtgaccagaaagatttgtgtttgacaagttaagatactctaaaccagaaagcatctcaatcctcggaaacattcctctgttgaatctattccaagctagatttaagtgcttgagcttctttagtagtgtcagattcttgataactccactgagctcattctcagacaagtcaagataaaccaaactaaaccagttggagtctacctgagatgagatatgaccttgaaaccggtttttgctgagatcagccacttctaaagtctccttgaacacacctgtcactgaaccatcaaactgatttcctgaaatgttgagaaaactgatggatttcatatcagcaaaatctgtgtccctgccatgaatcttgtttcctgcaaggctcaaagtctcaagctttggaaatgcagagccaaacccatcaggaagagacccttcaagctggttagaggagagatcaatagaaaccagggattggcaaccaagaagtcctcgtggaatcgacatctgaaacccattatgatcaagcttcaagactctcaaactaacaagagaatccacagcttcagggattgcaccagagaaattgttgtaagagatatcaagtaactcaagctgcccaaaattgccaacattactagagaaagacccagagatcttgttgaaagagaggttgagattcttcaaagtgttcaaactccagaaatcagatggtaaagcagagattttgttgttgctaagatccaaagattgaagcttgctgagtttaccaattgtgttatcagggatttgaccagataaactcattccagaagcaattaacataatcacatgctcattcttggaatcacagaacaaaccttgccatgaacaaaaaggagcagagaagttataagcttgagaagagcttaaacccatttgcttatagaattcagagacaaagaaaccatctgtgtttggttcttggcaatgagattgcttcaagaacagagaaagaaacaatgcataaccccaaaaaccaagaccaagacccattgaagaaagcttggagctaaacaacaaaatctgcctccagaaaaaagaaaatctcactgaagctactttagggtactcatgcaagaaacagttgaagacaaatattaaggagagatctgaagatagaaaaagtgtttgtttaactctgtggtgcttctcaagaacacgagagaccaaaggacataaaaacaagaaaaaggaggatttttgtcatagattaatatataatattaagcttcccctacctctgattatgacaagagtatctttttttaattgggaattctgaaataccaaagagaaagagagagagagaagaggtaatgtagacagttggtagcagaaagaagttgaagctttttcataaatgagagaattcattcactcagatttttcagaaacagtatcattggtttctttttctagttgaacaaatttaaatcattcattcttctcactgaaaacccgtttcttttttcttttcttttgtgtggataaaacctgtttgacatttttttttctcttattctgtagagaaaaaggtttaaactttttcactttcggaaataaattattaaagttcgggtgtctatgaaagttttttgtaagagttctttattcttctttttattctcaaaagatatcatcttgtactttactgagaaatctatctccattgatgtgtcatgccattaaaggagagtgtgcaaagtatgaactttactttttctagattgtcggtagaatttttctacatgtttctaagcaagcactgatttttttttttggtcatcagtaagcaagcactgatttcttacgtataggatcaataatattacaccattatcatcagtaatgctacattattcgtttatgaaaaatattttaaaagtttaaccattatcaaaattgagaaaatatatacagtaaaacttctatatatttataatatatcagaaccgtgagattctattaatttataaagatatttggctaatttataaatttttgaaaacaatttatctaaaaaaagtttttttttttgttataatcaatattatgtttagaaaacaaccaaaaagttttctatattagaaatgagctcactacaaaagaatgatgtaagtgttttttaaaaaaacaaaaaatactagagtcatattcatgtcgtgtgaatccaacgtaatcatgaattaatctcggttagtatattgtattatcaacagaaagaaaaaagaaaaatctcggttactaaatgatcatgtcttgtgaatccaatgtaatcatggatttgatctcggtaaccgctggtatgatagcaacacaagttgttcaaatataaaatgtttcttttccttattataacaaatgtcatgcttggttagtcatagactcatagttgccatgaaattcaatacttttgctataaaactaacttgataattattatatgagattgactcgcaataagaggaatccttattttgtagtgaatcactaacgtaatacgagtaatttttcgatgagaagagttggcgtgtataagtgacgtgttacatcactcacgttgtgagaggcaaaaaatttttttttctttattctttaaatttaagaggttctgaggcgaagcccgtaatttactagatccaaaaccacagcatgtaatattagtttcgtctcaaacatcactcaaaccgaggaaaagaattattgcatgagaaatgaaagaacatttactcgtagagaaaaaagaaaaaacattgacgtatagattttgcttttaatgaataacaacgagttaccggcatatatttatttctttcaaaaattatttactgtccattaattctctatatatttatatatatcaaatactatatacattttaaattaaagaaggaatttctatgttagttgtagattttaattgattggaaaattcaattaaaaatatactttataattgaattacttagaattttatcttacattttagtagatttggaaatattttaaacggtcttatagtccatgttatatcagtggtcatgtactcaacttggttatagacatatatatttggtttgccacttgtttgtgttttcttaccggcttgctctttgtcatgtgtattgcacatccggttcctcaatcgcgttcaaacatgtacctcatttggttctcgtcttgccgcttcacccgtgtattcgaactagcagttccctttgatagagtaagaaaattagaagacaaaaagaagtctaaatctaaaattttagacaacaaaaaaaaaaaaaaaaagaagagagaagtctaaatcaaaaaggaaaatttgcataaattagaaacccaattgatcaagacttgaagatcacatgcattcagggatttggtgtttacttcattgtaaaaagacgaaaaaaaacatatgagaagtagacgccaataaaaaaaaaagcctcgttgttggtttgtgcgatgcggcatgtggttgttttgtttttgagctgacgaagtgtgttggtatgttcgtgaatcccatctatgtatttaagattctaaaattaatagaatggattctaaaacacataccttaatttctccttagcctcaaattaatcaatgtctagtatatatcatagttatacttatacatgacctgatgaccatattagtatattatattagccacatattggacgtacaaaagaacatgggatgcaatgctagctaatttgaggtagaccttgtaagaatagtaactacacgtatcaatcatggaaacacaaagtaatcataaccgaaatcgatgtttaaagtgtgatgatgaagaaaccaaaatgcttgagtttgagattggaaaaggaaatgatggttcgcttgacaacaagattgactcaaaaatgttgtttgccttttctacatgaatcataacacttgttcatgtttccggcaaaatcatttctacagtcacacgcatggtcacttcctcgtatttccaacttttttctatgcattacatacgtatgaatgatgcgtgttgttttttgccaaatatatatacatacgtattttctggcatcccatatggcgagattctataattcataaaatggattttgggatctttaggttatgacttatgattaaagactgagctaaattgggttttgattattaagataattaattaatttataccaaaatcactatatgcaatacaacgaataatacgttttaagtgcgattaaataattaaaattgattttttaaacatctaacgtaagatacaatactataatcatttgtgtatttccttaacaactaaacaaataaaggcaacaaataattaggttgcatataattataagtaacagtatgaaataacacaatgatttggaaatatctaatcataattctgatgtgtcatttgttttctgattttttatttttcttacccattgttttctgatagttactagagactataatgaaaatatgaaatcagggaaaagaaagttgcccaaaaaaaaaaaaagagtggatcaacgtcttcttgaagcaccgtgggcctactgaggcccaacaaaataaattcaaattatgggctattataaacttagcatcgaaaaatgtgagccgttaaatgcaaagcagagaaaaaaagtgaattaactaaaaacagtaaaacacacagaatttgggagatgggtcgtctctccttcactgttccttcgcacgtgagtgtgattttatgcatgttgatgttatttatgacttatgataatgttactctcaagtctcaccgtttctccattcatcgatatgcttcttctctttattggtcttggtcaacaataaaacatgttctaatatgatagctacaagctacaaaagaaaaattattgtttgtcaacttcttgataacagttaattacaaattcatttaatacatatcataagtaaaaacaagttcttgatgaccacctagttgaccttgagtccttgacgatgaatgtaaatcaactttccaactagcgtcaaacttaaaaaaaaaacaaatattgcttattacattgatattcgtccaccaatatttctgaaatttttttattgagttggcatatttacctaatacctgaaaaaagcaaaagcaagagatgtggaggtggttaagtggttctgaggtaacttaagtataactaaagaagaagacgacaagttaaccaactcattaaccaaataattttcctccatctaaaagtatgaaaacacgaaaatgtatatggcatatgtaatataggttgatatctataattttctggttttattaatttgaaacaatatcacaaaattgttgatatctaatcatccaaattcaaacttgtaaactaaaagaaagttgccaaaaaaataagtaagaagagttgaaaagaaaagacgaaaaaaaacacagaggtatcccaataagacgagtgccttgaaagtacaaacaatcgaagtttaataggaaataataggggacaagtggacaactaatattgttgactattaagttttccttaatatagttcgagaatttaaagtatggtttatataatactctcaatcatgtttggaccgaaacacgaagaagaagccgacgttggtgtgccgtccacgacccgcatgaccctccttgacgttgaacttgtacacttattatatagttatatacaaaaatgatttatgacatatataaagtaaattcaacataaaatcctattaaaaatgttaaatagtttaatgacgttagctaaaccctatcccgttctctcggttagccaagaccaagaggaccgaaaaaatgtaatccatttggatttggtgaacgaaacttatatatttgatcgttgctttgtaaagtaatatattcattttatacatcatatgtttgttttggtaacagaactgtagtatattataacaaaataatatttttgacccgtttcagattctgcaactaaaaagtatattattgctaaacctgaaccataataaactaagttatatgatttaaaatatgtttcgaatttaaccgatacgttgtcttattcgagtggatattaatgtcgccaaacgtatgccaattctgtagccttatggtgcgcaataaatcactttggtcctctcttatctcgaagaacataaattgcataccttatcttcttatttactcattctcacgaaaacatcttatcgtttcaaaagcatatagtttactaatcgtctcatatttttctaattgtataaattaacatggacgtacaaacaatatctaataagatttttttgtttgtttttaagttttcctattataaaatttagaatcctaatatctttttgtaatttgataaggacaacatataaattattaatatttgacattcaacaagtcacaaatgaataatgattgattattcttatattgatttggattgttccactaacatgaacaaattgtttaaaaatggatgaaatatttgagaaagtttgtatggctaaacttatttttttttaaactaatcatatatattatcgtcgaaatttcaaatttcctattataaaattataatcctaatttattttgtaattccataaagaacacacatagataactagaacctaacatacaataagccaaaaaatgattgtatatttaagttatctgattgtgaaatgttccactaactcgaacaaataaaatatccgagaaagtctcttcttatcatttatattaaagttgtgttcttaaatcaataaatcaaagataaggacatcacacttgtgatattacccaaactattgatatttttctttttgcttatctccccaaattcaactttacgtgtgtataaaaacaggtaaatcaataaaccaatgaggtgtgatcatctgagaatgttctcccgatttagcaatctactacactaaatatcaaccgttggatcaaaaaaccaatacccttgagaacactaacatccaacggttctttcttatgtataaatgtagaaacaactgttgtgtgtaaacggaatgaaaaaaaaacagaagcagagagagaaaagagaagacagagtcaattcaatttctgaaaaaaagttcaaatttttctaataaattttgatttcccattagtcagaaacatcttctttctcgtgcccggagctcaatttttcaaatttcattgaaaaatcgaagctttcctggaaaatttttgcattctctattacatcgtcttcacctaattttccattaatgggtatctcaaaagacaggatcaaattcaacgttggtggacgactcttcgaaacgacggcgacgacgttagcaaacgcaggtcgtgattctttcttcggagcattgttcgacgacgaatggaatctttcaccacttgaagattccattcttttcgtagacagaaactcagattgcttcgcagttcttcttgatcttctccgtacgggagaccttaacgttccggccaacatccctgagcgtctccttcatagagaagcttctttctacggtttacttgaccatgtacggaccgctaaatggggtccgtttgatggtaaccgtcttcgtctatcggattctgttaaaggaattgctcccggagacggaaccgccatcagggcaggtcctgatggcggttgttgcgtcgcgcacgggagtgttgttcatgtttttgattggatgttggaagaacattctccgatcaaccttgattaccagagagtaaacgatgttggctggattgattcagacaacatcgtactctctgcttgtgagaaattgggaagaggagatggaggaatgggactgttcagttcatcttccggtgatcttcggtataagtttcaggtctgtcatgagaatcaggtgaagagttatacagctggagctttgagtttttcgccggattatgagatttttgcgagctgcaaaggtcggagtaatgagtatggaatcggagtttgggatcagataactggaaagcaaaccgatttcttctacgagagtcctggttggtcacttggtgatgctgacaagcttcaatggctgaatggtaagaactgtcttcttgtggctacattgtttccaagaaaggacaactgttacattagtttgttggattttcgggacaagaacatggtttggtcatggtcggatattgggtctcctatggcgatagacgagaagagagtgagagatgcaatagctatggaagatagcaattcgatttgtgtggtgaatgagtttgaggatttggggtttattgatctgaggatgtatggaggaagcgtgaggtggagttcgagaagtaaactgatgaagagtaagatgcctgatgagccttgttacccgaaactagctttgcatgaaggccagcttttctcatcaatgaatgattctatctctgtgttctgtggaccagactgggtcttaacttctaggctaagaagaagctatggtggctcaatctgtgatttctccattggtggcgaccgcctttttgcattgcatagcgaggagaatgtgtttgatgtctgggagactccgccttgtccgatcatataattcactaccttaatactctggtttgcttttgttcacgtttagtttgcttgttttaatagagtccttagaaaactacagagaaaagaatagcaatagacaaagacaactatagcaatagactgatgatcttagttttgttctatacaaagaaagtgttgcttcttactaagaaatgatatcgattttatacgattttatgtctcttacaccgatcaacgatagccaggtcttcactcgatacagagttcttagtattagctgtgttttattttattctcgttagacttactaagctgtttccatggtggtccaaaatctcaacctcagcttctttaaggttttttgaggattcgttaccttagtacatgtgagtggttgcaactgctactgtcttttgggggcagttaaagtttatatcttcatttcgcttttccttaaagattcaagattttagcttttagtttttggaaggaattttcttttctcatttacactttccgggaaagtttgtggcataacaatgtgagctaccacattggataagctctgacctttaaagaatctagttcacttcttaccatcactttgcaaaatcagtctctaccctctctgttccatttccattcttaaaagctatattctcattcaagaatattggaaatctgatatgttaaaaaaaaagatggaaaagcttacctaaccgttgagaaaatcaaagactccctcaaggcaagtacaatcagctcgagtagtcaaaagcaatgtagttttcctgattatcaccttctttcttgaaagcttccctgaatcacagaaaaggcttaaatttgatacaaaactcaaacgtaccaactgtcaagatcttcactatcccaaggatacaaactaacaacgaagtgatcctgtttaccgctttcggaccagttttacctacggactatgcaacacatgcaccactacttcaaaccaaaatgtagtagcaatatacaacgatcaaaaagctcttaacagaataaaagcaagaatagtagttgtatgagggtatggcataaggggacgacattgctgctatgcctgcaacaagtttgataagaacatagctggttaccaacaaatctttctagactaactacaatagaccattgcacatttgctagagatcatgtatagttcgagttttcaagtacacaaaatctagacttaaaatcaaaggaaaacatagcctttgatctaataaaaacagaataacagtctgaagtgagaatttgcggcctagcgttcaacccggaaagacaggaccggatcatatctgttgcggaacaacacacgattctcccttgaggatctccaacaattgatattgtcttcagcctttcttttatttgtatgtactccatatttataggggtaagttacattgcgtgacccaacggtgaacaaaatcgagtccccagtcaaaccacaaccatgaggaagctccttagcggagcagtagaaattccccaggtgtccaccaagaaacaaaacacggtctcccaaatcgctgacctcaacccattcagcagcctcctcatctagcctacttactctacatcttaggaagtctgtcttaaccaggaaaagctcctcattgccagatggaaccagaaagttggagtcgatatgaggtgttaggggagtcgcttccagcgaagaaggatcgataacgaacgtgtccccattaaagaaagttgcatagaaccttcctctaaaagtgaataactccttacatgaagcagttgagggtttctcaagccgaatccatctcatttcagtacttcttaacaccaaaaacaaatcagtgcagtcgaggagcgcaacgaattcgcctcctcctccttgttcgtttagcggaagaaaagctgcactgtattcttcaggattgcaaccgatcatcaatctgtacttatggcccagagggatgatctggcagtcaagcatgttcatcaaaattggctcagttcctggaacattgactttcactgagcactgaagaggagatggaagctccacatgatcatttgacttatcttggcctaatcctcccagaaaatattcggaggaagcatcagcagcatcaggaggagttagaactctaaagaggaacaaagggaccttctccagggtgcagcacaagtctttgctttctaaagggaaagcgggaagagagtaactttggcgtaatagagaagaaggaaatggaaatgtggatcgccatgagcggcaaacagagcgggcatgaacagcatcgaaatagtgatcctctagatgcgttgagataatgtgaagtagctcttcagggagctgagaccagtctggcattatcgatgatgttgatatcttctttttcattgccatgcttgctgctgaagaacacagaaatttactgctgcaatttcgaaaatttacaacttttttttaggggtttgatgaaattgctgaaacgatccaactcttccatttttagaaaattctcagttcattcttggaaaataaaacccaacaggaaaaaattgatttcactgaagctccaaaggtcataatcaattctgggtttgatcaatttgccacaggaaaaactaaaagttggtaacagaaaattcacagttcattatagaatattcgcagggattaaagagataggtcgtagtagtaccgtaacttggagaaaaagttggagcttcctgcagattcttcagagccctttcgtagcgtcgacaaatggggatagagactagttaagatttagagcgaatttggtttggggttggattgattgggaaagcaaagaaccgaagggattgagacggtttatatcaaatgagccggttaagactttggttttcggatagacttgagatgacgtcgtttttgcattatgttgttgttatgtttcttttcttcgttctgttgattgttttgtactcttgtttctctcctctgtacccaagaatatttttgatactgatttgccaagaggtatcttcgatcggtttgaatcttaggaactcgtaaagtgatgtgagttcttgtttttggaacggttaataaacgctagtacgcaacattaatgaaataacacagagcttggtaaccccatcaatgaaactccctaggctaactatagaagtaagtttcattttcctttaaagatgatttcaagaacttagctttagcttttggaaggaattttcttttctcattgacactctctgggaaagttctggcgtaacagtattagtatgtgagctaccacagtggatatgctctgatctttaaagaatctagttcacttcttttcatcactttgaaaaaacaaatgtctaccctctctattccacttaaaagctatattctcattcaaaatgacatcggtataatatgttaaaaagatggaaaagctaacttaaacgtcgagaaaaatcaaagactccagggaaatatcaacgagctagagtaatcagccattgctttattgaggaagtcttcgggagctacacggtcaaaagcaatgtagttttcctacatttagtccatatcgtcgtcatcaagcgccagttccattcaagtagcaagatttttaaactgcacaaggcagcacacaataaaagatcagtgaccaagaaaagagtttctatatcgtggctaaacgtttcagttttggacagtgtcaaattgttcaaaaagatcatgatgacgaaaaaaagttataagaactcagaactgagatttaacttcaacattaaataccagtgatccaacaatgggtaacatgagatatcacaaaatccatacctaaaaatatgataggaatttatgtttttatttctctaaagcaggattttactgcctagcagtcttcatggagagccataaccggaaaaaatggttgagtatcatcacacgattctcccttgagatcttttaccgcactttgtttatagtataaaaatgcattgcctgactgatcgccgaacaaaactgcgttctcagtcaaaccaaaaccccgaggaaattccttagccgagcaagagagatttccaagtaacaatacacagtctcccaaatcaccgacctcaacccatttaccagccttctcatctaccctcctcactctacgagctaaccgactaaagtctattacaacatcatttgggatgattacctcaaccaggaaaagttcatctttgccatatggaaccagagaccgtaattctcgcgggtcctgaggtgaggacaacagaagagtcacctccagcgaataaggatcgataacgacgatttgtcctgaaagaaaaagtgcataaaatctgcctctaaaagtgactatatcaacgcatatagtatatgggacgttctcaagctgcttccacctcatttcagcacttgttaacaccagcaaagtgtcagagacttcgagaagcacaacaaattctcctcttcttccctccttgtctagccgaagaaaagtcgcgcgattatattcccaaccgatcattctgtacttatggcccaaagggatgatcttttttggaatagatgctgggatcttcacgttcactaaacattgaagagcatcggaaagctgatcatcagcaatatcaggagatggaccttctcgagggtgcacatgtttttgctttctgaagggaattcgttgaacgagggaagagagtaacttgggcgtaacaagggagacaaaggaaatgtggatcgccacaagctgcaaacagagcgagcatgaacaacatcgaaacagttgtcccctagatacttcaagatacagtagctcctcagggagctcagaccagtctggggttatcgatgatgttgatgtcttcttcgttttgggttctgccatgtttgctaatggagacagaaaacgctgcaatctacgaatttgctaaaaaaattctaatttacatttgaattgattgtacagtaaaatcgcaacaaaatattggggaaaaaacccgaagattcatttggcataaagagatatgatcgtaccgtaacttggagcccaaggtctctggagaatttgaaggaagagagagtgattttgattaagctttaaagaaattgagtatacaaaggaagaatcgcttccgctgtagcaatttactgttagtgtcgattgtgaagtttgccctagactagtgtcgtagacgagaagatttgaggtgggacatgaattgagaaagaggtgggattcggttcgagattgaattgggaaattaaccgaaggaattggccggttaaaatcaagtgaagctgattaaacaattcgggttttgattttgaatataaagatcacgtttgatagtggattgataggcaaagctttgcgagatgtatctttgatcatttggaacacgcaaagtgttgtgttcttgttcgttcaattctaaaacaaaacgattgattgaaaaggtatgagtttgtgaagtttgtgcaatagattgcaaggttaaagcgattggctttgatcgaatgggagcatttccgatacatgtagcgcctggatattcaaaaaatggaaaattgaaaatagagaggctgctcgaaaacactcaaagttaaaaataatgtattagacttagggcttgattggttctccctttaccacccgcaaacgcttgttagcgattgacaccaatcatagaaatcgttagatatcgttttggaccgctcgaaatcgcccgtttttcaaaaactcttttccgcaatcgtttgcggttgcgagcggtagcggttaggttaaaaaaaaatatcattttttaattaaattaaataattgtggcttccatccaaactctaattactataattaaaataatctaatcttttatatatctgatttttattagaaaaccttaatcaatatattgtaatcgtattgtctcaattatggcatccgatgaaaatcaaaatcaagaatcaaacataagtatcatctatccttttattcattcattacctagtgtaattctttaactatttcatagcatcgttgtttttattttattttgtattcttttgagttttttgattgaatacatgtttcgatttgttttctcgattagaaatcatttggtcggacgagatgatatattgtatttttatttggtcagaaaatcaaattttctaatattataaatttatcataatatattgtatttttatttcttttaatagtaatatattatatttattttggttattttttatttaattactatcgcatccgctggtttaccagtcaaaccccgcaaacgcacccattatcaaacgctcaaccagtcgttcaaaactcttgataacgcttaaaaccgcaaccgtccgtttccgcaaactcccgcaatcgcaaccgcatccgctgtgtttaaaccagtcaggcccttaatttggaaatgtcgtttgctaagattatttttctttaaatcgatctgtatatgaaagagtatgcacgtctcaaagtgtttaggaagatattttcaagaggaaaggcattaaacaaaaagagagtcataaggatatttcaaagatatgataaatatatattgaaatattgggttgtatagagagcaataatttcctaatggaaagtaggaaatatgctagtttggcaaaagggaatgaggacatgaattttttacataagagacaggctttgtttgggttagccaaaatatttaggaaaaaaaaaaagagaaaaaaaacaagttttgttaattagcgagctagagtttcctcgatggaatacgttttggtttctaggttgtgttcatagatcaaagatgtaatttaaaaagaaaaattaattttgtagtgtggatttgagatagacgtgtgttgtgataaaaagttaatggtgtcaagttaagaaaatgttttagactttttagtattgagtaggtccatttaaacagactgctactgtaaaattgttaaatgatgattgatgtctatagtgaaaatgtatagacgtacgtacctctttgttttgtacagaatttgtatattcttcaaactcatatcctaatatttagacttgtgcgatccataaacatctaaagtcttggattcaatatttgagatttgagagacgagattataactccatctctaagtgaaaaaccaatatactatttttttctttttctagcctaatattcagatcaacgataccaactttatttaataaaaataaaacatattgcaaccatatatttaaaaaagaaaaagaaatgtcccttgaatggttttgtagtgcgtaggtaaaagaaccaaaactctacgaaaaatatggcttcgttcagagaacacatcaaacaacctcaacctcattcttcgtagactttgactttatctcccacttcaccccactttctctttgtttttggtatctctctgcctaaccccaaaagtaaacggccgttatcacgctttcgaaacggatacggcctctttaacggcgatagaagacgacctctcggtcacgccgttaccgtttaatttcccattaccgctacccatttttgtactcgtcgactgtatggtcatgccagaaagattgggaggggaaggacctccgacgtcggcaacagctccagggatcaaagggttacgggagtgacacgtggcggttgagatggcggtggctaaagagattggcatgagacaaagacctttcccttgaagatattgcatggccgagcccatgtcttcttccattagtttggccacttgatgttccgtcattgtaacgctgtcgttggagtttccggccgtctggctaccgccgaccatggcggaggatgcgttcccgtgggatccaccagcctaagcaaaataaaacaaaacattttgaaaaacaaaaagacaaagaaagcgaaaccctaagtgattagtcggcacgcgtgctctcttttatatttctctattttagaattataaaatttgtcttatttgttttctgtttctggaaactttttacattcattttgttttcaacgtcttgcacgatttatctatttttacacaccaaaataatattttgtaaaatctaattaacattataagagaaaagtgattgtctaatttcttaattttgtccattggctttgatgtttattgaaatttatgaaaaatgagtacgtagagatagtaatatattagttacctcggagatttgagaagaaacggaagcagcacctcccaatctgctcatgctcagtacctaaaacgcataattaaattcaaaacagaatgattaagtacactggtccactaatttataacttaaaaacattatttatcatgtatgtatttatatgacataataatccagaatgtatatataaaatttgaggagggagcataaggaattttagttgcagaggcccataaatttgatatattggtatgtaaagattgtactaatatgtcagcttttctttttgtttaatatgtcaaactaaaaggcaaaaaaacgaatcttccatctatattgaagagaataaaataaaacaaattgcactctgtaaaagaattaccccttgtacgtatgaaaaacaaacttaataaaataataactgtaaatatatgagagagagggagagattcaccttgacttggagttgtaaaaacttgacataatctatgatctcatcgagcatcgatgccttgtctgtctgtccattattatacaaataaaatacaaaaacaaaactgtcagaactgagatcctaactcatttattactgcattagttaactttattattgtagcctaattaattaattagctaatcagtgtttaatcatttgattgatatatactactagctactcctatatatagatagactacacaaccaccaattatatgagtaaaacaaaaaatataaatttacttgttaactcctgaaagttctagttgacagcctaaaactatctcttgaacaactagctccaagaaagttcctgatcatttcgacacttattttcattatttattttgtattttttcaattttaggtctagaagatgagaactataaatagacgatggagtttaaattgtaaattagatggaattatggatcgcacgaatcaagagtggatgatgaataaaatgatggaaagtgaagtttattttcataatgatccatttaatattttaactaatcttaatttttggaaactaaactgaaaatgaattgaataaaaatttaccttattgccgttaggaacgagttcttgaagagctttcattctttccgcaattctctctcttcgtaactgtcccataaaaacattttttccagaaaatactcaaatcttttcttcaaaaagctaaaaaaaattcaatttcgacacctttctcggtaactgatacaaattaatgcatcgaacaaagtaaaataaaaaacaaaaacaactaaccctttcggcgatactatgaggatcagttgcttgacctctcctagctcggattttagtcctactctgcggcggagccgccaccgtaccaccagtagctgtagacgcgctcgcctgaggttgcgtttgcgtttgcgtttgtccttgttggttcatcaatcctcctcccgatccctatatttcaccataagtctcgttttcaagaagagaaaaacttagaaaagagaaagagattatacctgagggatttgaaagttaggaagagatccggcgacggagaagccattataaagagcgtggacggaggagccatcattcaaaggcatcatcatgatcggctgattccttgagtcgacatcgtggccgtggaagccatcggagggaagaggatgagcatcatcgacgacggagggccacggggccgaggaaaagatttgatcgaggaagtcttcgtggtcgaaagttgttgatggagtttggatatgggaagaagatgaagaagaaggagttagaagagaagagttcatcatgatgatgatgggtttcttctgcttctacacttttttttgggaagaggttgaaaaatgttgaggtttatagctttattataaagcagaattgttgtagtcttgtagatatattattttaattttaggttttaattatcatttttggtgatatattattaaaaccttaaaagaacttttgtttttctattgtggttagcaacccatattatatcgtgatgatgaatcgatgattatcatcttttgtttcgtttccgtcttaaactttggtttctctttaccccaaatcttaatcattattttttacagcttaatacgtatgaaaataagtctttttttaatgtacatattgctatctaaagagttttatttgattatactttttcagatgcaaactagttttattttactatacaaatatatattaaacattgatggataagaagtttatttatatggtgctaagtgtaatagctagcttttgtatacaattatagttttcttagataacatttattgtttagcaattttattatttttgtgttttcatgtagtttaatgatttgttttgttgttgtaaaataaatgttgttttcatttttctatacaaaaattaaatatatttaatatttttgatcaattatattttgttacatattttttattaattaaattaggtgtaattaataatgtttttatagaaaggaaataatttaaatgagatttttgtgttttgttaatatgtgtaaaaaatcttatataaatattatactgtatatgggtgatgatggcatgcccgtgattattagtgcctttcttacgtttcaattgtggcttctaaaaattttacatggaccaaggagttacctaattagtcccaccaaaaaccaaatacaaggaggatatccttgtccaatcctagatctgatcgattaaatagaggcttggatattcactcaaaaggttttcctaagaagttgattaaccatttgggtggaattcaaaatgttcgagccatttagccggataaacgtgaatttatccgaaccataccaaaatcaaaaatacttacttacccattgaaaaatccattcgacctaacgacgttaacctattttttttcttttcagagagtacatcattttaaggagaatgatgaaaccaaacgaccctttggatcgatggaattcaagagatgtacattggagctacccaaaatggtctcggaccacctaagtgttacccaatgattaatctagctacttgactatctacagatataccttaacttcaaaattcactggaaaaccaaccattttaatgagaatgatcaaaaaatattggctttggattaaagtaatttaggagatggttaaaagagcacagccgctggtcgtttacccatatctatgaccagtttccaacccatttacttctagcccgaccaaaaacacttgtagtccatcttggtaagctaattagttttacatggtactgcaaatttgttcacacacacatggtgcatttgttcaactcatatatacgaatgttaaataagttttaaaattgtaaataagtttctcattatataaaaatttagaattttccgcaattgatcattaactgaattatgtatagtacaaaattactcataaaatgaaacatattatatatttattaatacaatccgagaatgaaatattacattcatgttttaataatcttttcacgatgataattgacaatggtctaaaattataaactcgagcaggtacattcatcaatgatgctagagctctcgaaattctactgtttttttctatgcccccaagatcacaaacatcctatcccaaagacgatactcgtaaattaataattacaaaatatgataataactttttaaaatgaaattccctatcaatatgataacttatcttttgagctaatcacgtacgacgtggagctttttctttataaatagatagttattattcttctttttttttatttttatatgtagctgaaaatttggtatttctttagattgtgccacattcaccatatactctttttgggataaataataacattaaaatatttgcaaacttaatttttgtgtccggatgtttgacacttcttcatttggattcattaactaatacatttaaggtttcgaggtctgtattttgtagtcagaaatattgttttcctcttttccattaattgctaacatgaacacattttaatgaaacaaaatctctctattcattatattttttttatataattgcattttttcacaataaagttttctaataataaaataaatcataataaatgcttacgggagttacgtctcattatcataaaatattttttgatttcttgttaaaatattctttttgaaaagttatctcaattcatagctattttcttaattatagttatagacaacaaaattcgtgaaagcatacttataaaaatcatatatgtgtgactgtgtgcatgtatcttctcatgttataatgcacattcatgcatatatgtatgtagtggttcgtaccatggaataagttcattgaaataatattcccaagtcagaattctttcaaaaatttaacgattaaacaaacatatataggctcatctacgttcatgtatgtctacgtatgtgcatgtgtgtattgcatattacgcatataaatacgtatacatgcatatcgagctttacaagttatatccaacaatctaaatggacacgtcttgtgttggcgtgttcactttccactctccgagttataggtttcaaaatgataaaattttattttcggttaatcgatagaatgttacagttttgtgtcactcacaactcacaagtcacaatttggtcaattaatggtctttaatttaatcaatagaatgttacattagaagcctcaaactttcacggttctttcgatagaatgtgcacattctctacggcaattaagaaagcagaacaacccatcttaaaacagaaaaaaagagtataacaacccataatcattgttaaattgttatatcaatatttttatgaacaaaatcaaaccatagttatattaaaggtttgttagaaagataaacaatattggaagataagttaacttcagttaggaggttttattggtttataatttttacaattttttttgataactttagtaatatcatagaagataaataaattaatgaaagattctaaactattggtagagagtttttataatattattgattaattttttacaattttgtaaactttttttaacaatctctattttgatattggtcgacaaatgtccatgtctacataaaccaataacacaataatttaattgattaacaatcatacatttttttgtttcaattaaataacaatgactttataaaagtatgaatccaataactttagttttataaagattttagataatttttaaaaagttttaaactgttaacaccaaaccttaataaactttaaaatttttttgattaagtaacaacaaattttacgtaatattttaagtcattaaaaatttatttagatcataaacaaaagaggtgtagatttgagtatgaaacaagtacatattggtccaaataaactagattttgtttttgccaggaaaccaatgcaacatataagtatttgttcttcagtatatatatggaagatatatatttatataaatagtatatttaaatgggattagtcttatttaagaagaaatattcatattctgcgtgattaagcacatgggacattctgtgtttgcacaaactcacaagggagaaagatgggctttaattacattcatttattaattgcaaatgttggtcaaataattaatgtactacgcaacaaagctagagagcaaagagatcgatgaactgatataattattattattaagacagagaagtacttaaacaggtataattatctttgtttgttcttaataaagtaaatcgaagtcataaaatatgaattttcacattcttctgtataataaatacatattggtatacgtctttgtcatttctccctttacacctcaatccgcatataccacataattttaacgaattgtagtttacatttttttgtgtaaagcaaaataaaactcgctgaattgtaagttattatattttctatacaatgactataactttaaaatgtaactaaattatttaaactgaaaatagagcattacacttccacaacttcttaggatattcttccacctaataatctggtgatcatattttaaaaataaaatatcaatgtctcaatgtctaatgcaagcaaggatgagaactgagacttgagagtggactttctttcttccatcaattggaaactgaatttgtttttttttagatctcttcgattatctcttcttgaacttccgctgtcattgtcaactaaaaatctacagttgtttgaaaaaaaaaaactattctgtttaactttaatctcgactgcaattaccattcaattaccataaatcgacttataatttattagtgtgaatgtcttaaaatggtaaatccgtaaatggtacgtactcccacatttattttttctttactcccacagttattcttattcggttaattatattcagacagaacttgatacttttttttaccacattaatactccatacaaaaagtattcatctgaccagtttgtactttcgataccatctgaaagaatactttattgtagtaaatttttggaaaattccaacggagaaatcaatgagattggtctcaaacgattatcttaaaatggaatatattttcaattattaccattaaccaaaatcaaaattattttaaatgataaaactccaattatcaaaagaagttttcagttttgtgtgctcgaatcacaggcgtgagatgaaaccgtcccctgttataacacaacacaaccaaacctctcactcatctttcataatatcctcttattggttacatagagattacaaaccataatagttacgctaatcactccctttattcgcagtattcgattgaatccaatacaaacatgacatgattgattttgattctaagatgaagaacataaaaaaaaagggaaactaacccatagagtaagaaggtgtaggcaagttaatgacagtggtcttcactttagtcatcaaattgatgctatttgtcacaccttgtgaccctattccactgtccttaagtccctgtttattccaatccaaaaccgagttaatcaaaccggtcataacggaggcaaaaaagggtctagacatcgatggtttacctggaaagggaagtggtccggtccacgagctggcgcagagttgatctgaacggttcctgtctccattgcatcactgatcagtattgccttgttgatgtctttagtgaatacacatcccttcaaatgcaattattgtgttagctctggttaaatgcaaaccatataaaccggactaaaccaaatccatatagccaaacctgaaggccaaagttgcttgcattgcaatgattaatcccttcttcaacagaattgatcctcaagaccggcacaacaggaccgaatggttcctcccacgcgatcctcatgtccggtctaacattatccaaaagcaacggccaaatcaagttaccctctcttttatactcttgacaaaacgttgctcctttctccttagcatccatcaccaatccttcaatgaaattagctgaagattccgacaccactgccgtgatatcggagttctcttcgggcggtcccaccgtgagtttggccactttagctttcactttctcaacaagctcatccgctactgattccatcactaggactaccttaaccgcagtgcatctctgcccgctggttaaggtagataaaaccggttaacacataatcacaattggttaactacattcattgtaactaggctagctatagcataatacctgtaagagaatcctcctttgatgatattggaagcaactaaatcaagatcagcatcatctagaacaatgcatgcatctttacctccaagttccatttgaagagggatcataccagctttctttgagattgagattccggtatcaccacccgtgaaactgaaaccggttatcagaaatattagcagttaaaatgaacataacctgttttgttgaatgtgtgtatatatatatacctaatgcagttaacagcagggtgcatagtgaggaaatcgccgatctcagatccttttccggtgatgcagctgataagaccttttgggaaaccggctaagtgaaagcaatgtaccatgtgaaggcaagaaacagctccctaaagaaactgaccgttaaaaagcattttcaaaacattcattttaaaagagtgttaaaagcttcttagttacttgagttggaggtttgaggacaagggagtttccggcgatcaaagcaggagcgatcttcgatacagcgagattaactggataattgaatggaggaatagccaaaaccacaccgagtggaatcttcagatcagaaaacaaacacataatttgatcaaaacatttgttaacaacttcaactattgacgcatacatatgaatctaagagattataccttggaagtgaggcagtacttagtacggtcattaccggggaagctatcggagagaagaaacttcccttcacctaagatcctaacaccttcttcagcacaataagagatcaaatctccagacctcacaacctttcaccaatatcaaacattaaagatcttgaaaaacacaaaacaaaaagagcttcgtatgaagttgatgcatagagagggatatggtgagacctcagtaacagaatctttggcgggtttagcgatttctttaacaagagactcagccatgggagctttgttgtccttaaggattgctgcagccttgtgaagaagctcagctcttttccaaagaggagttttcgcccacgatttctgagctgatttcgccagttccatcaccgcgttcacttcttcttgcgtgcatgctgtgttaaacagaaaaacagaacattgtcttatcttgaaatcctctgtttttatcttctctgtttatcttcggagattcttaggttgttatcaaaacttgttcaagtaatcaatctaccaaaattcatcaatatttctagtatatatctccaaatttttgccaatatctgaaatcaagaaagaatgaaacttaatgagatataccttgaaccttgtactgtgtcttcctcgtggccgggttcatgatggcaacactcttacctgaggaagaagttttccactcaccatcagcgtagtatttgtatacttctccatcaagaatctcagcaaacaatccagtcccggccattgatctctgaaacaaaacttaaagaacacaaagttgtgtgtgttgtgttgatttgtgttctgttcacacaatgtttgaatatatatagccaaagagacaaaaacagagaagaagactaactctctcctctgtgtctcgcttcttgagtgttgtataagagagagagagagagagaggaagtgattattgatagatttttatggaaggagtggtgaaagagcatgaaaggtagatagatagagataagtgattgaagggtaaaaagaaaatctagaaaaggataaagagagggagatgaaaaattgtatggtgagaaatgagaatgagaattagagagagtgaagaagagtttcttggtgtgtgatcgttttgttggttattgaatagctattggtcctacatcattgtttattaacgaagggactcatgatagccacaaccacaaacatgtctatgtattcatcatacacaaacaaacatgcatgtatttattttccaaggtccggttgttatggaatattccaaacaaattcaaaaaaaaaaacaatttggtcatattattgaaatttcaaaaaaaatcttgaaaagttttaaacattttaatccatcttctataacattaaataatcaagtgatattattcatgaattttacaacaattatatgtaagccattgaaaaagatgatatgtaatttgcatagcagacatattctcaagtggaactacaactctataacatgatcaaaaagaaaaacaagttagagatttcatcaactgaaacaagaataatcaaatgtttataaaccaaaaaaaaagtaagcagaaacaacatatttaaagtataccaagattttttgagaagatgaagatgtttaggttgcattacaaaattaacatctcaaaataacaaaaaacgctatggagtgaaatcacattgtttgaatgttggatgtgtaagtattattaaaaaactataatattttcatatagaaagttttaacatagatgttaattttgcatagtgaaatcacaaacatatatttttgcatatgagatacaacatagatgttagtcaaattatcaaaatttagatttatctttaattgttgttattagaacagtttgggctctatatgataagagttttacctttaacataataactagttgagatataaacacaataagagataagtggtggccttcaatacaaatagttcttctttttgtgattgatgacatatataacaataaaaacaatatactatgttagtaatgtcgaaaatatataagatttgattaatttataaagttactaattgattcaaaaatagtaatttaagaccaaaatatattaatctatcaaaatactaattacggagtattgttgtagatgttttactatactcttaaccacaatactattatcattcaaactgaataacaaagatgctacgatactatgataaacaaggaaattgaataaagccaaaagcggttttggaactagacgtagttatcttggttcaaggccttacacgttttgtttgtctctgtaagtttattctgatgtcgtgtaacataactaaattttaagtaaactaaaattttacctcatttgttccttacaaagttatggaaaatttaaacgacggttagaagcttttgtacagagttcgttatcttctttgggacaataaaagacgataagatttttttatttttttttaagaaaacatttttctcttttgtgattttaatcttttgaaatgcatgttaacacttgatttaattcataagttaactgctgattaactcttaattactcttgattagatcttacaaagtgataaaatattaatttttgcatatcctattaagaaaataaaaattatattcaacaaagagttatttaggtggcatagaaaatatatttcaaattcagagtgtcataatagaatttcatgttataaactgtgatggtttgagacatttagtattcatcatatagatcctactaagatattcgaagatgtgataatatttgtcaaatacatttcaattcagttgagaaactaacggctacacaaaatttgtaatggatctacaacaaatacatccactgatcataactaaaattttcgccaaaaaagctaagtcatgggtaattgagtaggtgaagagatgggaagaaaagtagatgcgaaatctcatcacataataattcttggtagttaagaagatcgaggaaccacaagagttcggataaaggacgaaaaaaaaaacttgcaaagtgatcaatttttaggaccacaaaaaccataccataacatcaatatccccaccaattggggtatcaatcaatcactcttccattaatcttgcgaacaaaccatagccttggaaatctttagttcattttgagagtgactattgtaaaatatatatcgtttggcttacaagttgttaggtgaattagaattgatgcattgtcgtaaaaacatatcatgtaaagctttttccaactcgtaaaataaatagtaagttaaaaactaaaccaaatcatgttagtaatattagagtattagaccataagttcactagttcatgattcacattttgcagtatgtaaaggttataaattctgaaatgagtccctccaatgcattcacatttccctttttctttgttctttatattttgctttaagaaataaaaaaaaaagttttcttctttcttgtttttgccggaatgagtcattgacatgtcatgatcattatcatgtatttacgaaaaaagaagtaataatcatgggcttgcactatctatatccactcgtctctatcggcaggcctcgtcatatcacgtgtctatgaacctcttttcttctccgactatcttcttctcttatgtttcaactaccaagaagttcttctggacctaacactatcacatctctttagaagaaaaactagcaagaagttctttgattatggtaatctaagaagaaaacatttatttttagtacttataaaagaagattaaaattgatggactctttgcaaatgcactcccaagtcgcaacacatgtatttgagccggacatggtataaaataaatatgtacatgttttcatgatctttgttgatttaactacttttcaagcagcattctaccatacatggaagcaaagaattaatgcggtcacaaccagcaatctattcactcttccaccgtcttcaagaaatccacaacacaatcaccgcaagaagacataaaaaatctctcaagcaaccttatgcaactctggttaatctgaactcacatcgagtaacgtttctactatggattccttgtttatctgtttttgcctaggattcaaagccataggctcttattttgtaaagcaaaacctattgattttatagagatactaaactcatagcataaaacaaaacccaactatttttcaattctagttttagtttatgtattgaagttaattactgttgtgcacaaaaaaaaaaagaagttaattactaatcaatccggtttattccggttcatcccggtctgctcacgggtaagtaaatgcatcttctttgtttcttttagaagcgctgtgacttggactttgcatagactctctgaatcgtctcggttctctcattagtttaagtatgaggctttgctcccagaagtgccaatggtctagccgttctcactttccggtggaagcgaagccaatgatctcaaactatctcatcaaacgagtcacattcgcgcaatgatgatctctttagcgctctttctatcattttcccctgtttttgtctgctccttcttcttcttcttcttctttgaggctatttgatgatacattcgaagtcaactgaacagaagttgatgtcgctctgttttttggcggggctacaaaatttgtacacattgaagagaggtcttctcttctttgctacctttttttgttagcagccatggctgagtgaatattcttccacctgtctgagagaagggtattctgatttgctcaataatacttatatgtttttaattttgattaattctgttcaattggtagtctgagtgatgaaattagatagatctcagagcagcaacagaagcagtatctgagaaaaggtctagtctttgtattagttgaaacttgtaaaccatattctttcttcttagctactaccttttcaatgacatgcttctgaatggttattacagcaataaggatacatcagtgttttgcttgaaaagtaaattgtgggcctaaaaccatttttaaagaatgaatgaaacaattatgaaagtggtcaactttgggaacaaagtttgtgcctttgtggtgctctattcagctttctctaagtttgtgacaacaaactgatgtgagttgtatcttgtttttgttcaagattgtgacttttgtggtgggattatttcaatttatcagtttagcctacctaggttctgttgagtggaattattggttctcagatctcaattaatttgagaactcttatcagaaactattccaagataagaaggtgttttttttctctatctcatagcctcattggtatagacctttttgtgttttggcagtattgttttgggagaaaccaactggattttaacgaaatattgttaaaccaaaggtttgttttcttggagattgagcttagctttgtttggatcattcggccacttgtgtgagagtttgattgatggttagtcttttttatatcatcatcatgctttgatagttgagagagaggaagaggcagaatcatcacaagttctgataaaggacaaaaccttttctgatgcaactcacgttttcacttcacaagctccaaaagagtttacttgggaaaacaaaagtttgacgaatgcaaaaccaattttgttagcataagaccaaacctacttcttcgtctgcctctttgcctgtatttgagttgttcttgttttgagagaaagggtgagaaaatgtctgcctgtttgtgtcttgttttcctgttcttctctattgttgcagaagcaacgtattctccaggaggtttccaccatctttcttctctaagactaaagaagaaggtgtccaagtcaaaacatgagttaccttttgaaactcgttacttccctcaaaatcttgaccacttcagtttcacaccagacagctacaaagtcttccaccagaagtacctcatcaacaaccgtttctggcgaaaaggtggtcccatctttgtttacactggaaatgaaggagacatcgactggtttgcttccaacaccggtttcatgctggatattgctcccaagttccgggctcttcttgttttcattgaagtatgagcttttgcaaaccacttaacctcatctgtagtttgaagaaagagactccaaatgtttataatggtgttttgtctgcttgttgcagcaccggttctatggagaatcaacgccatttgggaagaagtcgcataagtcagctgagacattgggttacctaaactctcagcaagcgttggctgattatgcaatcctgataagaagcttgaagcagaatctatcgtctgaggcatcgcctgtggttgtctttggtggctcttatggtggaagtaagctcacacccaccactttcagtgctataatcaattgatgagacctcattattactcatcatttctcataaactatgttatgttgtgtgtcacgtcttgtgacagtgcttgcagcgtggttcagactcaagtatccccacataacaatcggtgcattggcatcctccgctccaatacttcatttcgataacattgtaccattgacaagcttctatgatgccatttctcaggattttaaggtgctgtatgctctgtttcccgcaattttcatacaaaagtggcattccaatgaacttttgttataagcaggatgcaagtattaattgtttcaaagtcatcaagagaagctgggaagagctagaggcagtttcaactatgaaaaatggcttgcaagaactcagcaaaaagttccgaacttgcaagtaaaatatgctttaaatccattgttcttttctctaagctctccaaacaaaagcttaaccgaaactgttttgcttgaattttataggggccttcattctcaatattcagccagagattggttaagtggagcatttgtttatacagccatggttaattatccaactgcagctaatttcatggcgccactgcctggttatcccgtagagcaggtgagatattcattcgttaaagtgtgtcatcgagtattttctttttcccgaccgtcattttctcttgcatcagatgtgcaagatcatcgacgggttccctcgaggatccagtaatcttgaccgtgcctttgctgctgcaagcttatactacaactattcgggatcagaaaaatgcttcgagatggaacaacaaactgatgatcatggacttgatggttggcaatatcaggtaaactcatttagaccgtcatttagatatttgaacatattctaatagatttgacgatttgcagtcgctagagcaagaaatggttttatgttatgaaacttaaaacttataaatgacacaaaatgattattgaatggaaacaggcgtgtacagagatggtgatgccaatgagctgctcgaaccagagcatgctccctccgtacgaaaatgactctgaggcattccaagaacaatgcatgactagatacggagtcaagcctcgaccccattggatcaccacagaatttggtggaatggtcagtttttttcttcccctccattggatcagtttcttcggctgtaagattcaatatcctgctctttggtcatcttttgcagaggatagagacagtactgaagagatttggaagcaacatcatattctccaatggaatgcaggacccttggagccgtggagggtaagtggtactacacagtactattcggttttggttcttaaacagatggattattttcatcaaattttcagggttctgaagaacatttcaagtagcatcgttgcgcttgtgaccaagaaaggtaaacacttctgttatgtttatgaatgttggggaaagttagacagagatagatttgagtgaaaaatcgaaacctaacattgttttgtgtggaacaggagctcaccatgcagatctcagggctgctacaaaagatgacccagagtggctgaaagagcagaggaggcaagaggttgccattatagagaaatggatcagtgagtattacagagatttaagagaagagcaatagaggagccaaacaaaagtttattgcactaaaaatcaacaaataaagaaactaggtgtttttgattcggttcgtgtaacaaagtaaaagcttcaccaggaatttgtattccctcaaacaaaataatctgatgtttgtttctctatggagtgaattc

SEQ ID NO: 275 - DNA, 79555 bp, Arabidopsis thaliana
aagcttatactacaactattcgggatcagaaaaatgcttcgagatggaacaacaaactgatgatcatggacttgatggttggcaatatcaggtaaactcatttagaccgtcatttagatatttgaacatattctaatagatttgacgatttgcagtcgctagagcaagaaatggttttatgttatgaaacttaaaacttataaatgacacaaaatgattattgaatggaaacaggcgtgtacagagatggtgatgccaatgagctgctcgaaccagagcatgctccctccgtacgaaaatgactctgaggcattccaagaacaatgcatgactagatacggagtcaagcctcgaccccattggatcaccacagaatttggtggaatggtcagtttttttcttcccctccattggatcagtttcttcggctgtaagattcaatatcctgctctttggtcatcttttgcagaggatagagacagtactgaagagatttggaagcaacatcatattctccaatggaatgcaggacccttggagccgtggagggtaagtggtactacacagtactattcggttttggttcttaaacagatggattattttcatcaaattttcagggttctgaagaacatttcaagtagcatcgttgcgcttgtgaccaagaaaggtaaacacttctgttatgtttatgaatgttggggaaagttagacagagatagatttgagtgaaaaatcgaaacctaacattgttttgtgtggaacaggagctcaccatgcagatctcagggctgctacaaaagatgacccagagtggctgaaagagcagaggaggcaagaggttgccattatagagaaatggatcagtgagtattacagagatttaagagaagagcaatagaggagccaaacaaaagtttattgcactaaaaatcaacaaataaagaaactaggtgtttttgattcggttcgtgtaacaaagtaaaagcttcaccaggaatttgtattccctcaaacaaaataatctgatgtttgtttctctatggagtgaattctgtaactaatatctgattatatcgtggcattcatgaaaatgttatggaacaaagagggtatcatcgcaaatagtcaaaaatgtcacgcgtatttaaaccctaattagacaccgagaacataagtaacgtacgacacattcttcatgaaacaaatgcgaattcaattagattcctattcttcttcttcgctctcttggtccaaatctgttgtcgaggtaggagagttacaagtcccgaaagtgtatcccttctgtgtcaacttgacggagaccatcatgaataaaggttcttgtggcaagtcagatttttgacttcttatcccgtttggcttggacaatctgatcagctatatgttcggacaagacatgatcgtggaattggcttaggagaagttgatagacgtagtttggttcgaagtttctgaagtctagaaagattagtgggtcgggacctcgagaaggattctggtaagatccgagactcgtgacgctaccatccctgtcgtttatgataaattcctcgaagtctctgtctcgactgatcattaccgagtttaagaaacctgacgatgatggagtacgagaccaagcggttacatgaacatcgagtttcattaattcagtatccattgtcgaatttttattcgacaaaatcagagagaaaatatgattcgtggagaattaaagtgtaatgttatgtttttataagcatagatctgattataatttgttctaacttctaacgcgtttatggaatttccttttttgtctccattttttttcttttttcgttcttattttctttttgtttaaattgtttaatattatttgcgggtttacgatgtgtttatagataagatattttataaaacaaagaaaaaaagaaaatctttctaaaaactgtaattaatatttgctataatacaataaaaagtaaagtttggtagtggatcatgctgaaatttaaccttgaaataactaagttaatgaaatttgatcattttataaaaagttaaactaaattttaggatttaagtgttttttcgaaagttcataattttttcgttcaaaatttaaaagttttttttttttttggttcagactatgaatgatcatttgatcgataacttgttttttattgggttttgttggatttctcatagtaatttcattgttcctccttgtctttgcgattgtcctctttgacttcatggtactgaaatcttttttggatctttctattttttggaaattgcttggatagctcccgatcgtttatctttcaatcaaactacggtttcatttttctaagcccaaataatctcgatttccgaaatttcatttcacaaggcttcaaactaactccgaaagatgtggaaaaatttagtgaatacgaaaagatgtgggacgcttcataaataaagatgtgcggcaattttgtaattacgcaaagatgtaggcaattacgtaactacccaaagatgtgaggggatttcgtaaataggggaaaggtatgggataatgtcgtaattaccaaacgatgtgggggtgatagagttactagtgccaatcttggaatagatagtctccctccagttacagtgctctcttttccactatcgccatgattgctcaaacgtgaattgaatgatctgatccataatctaaaaaattgagctttcatcagtaaccgaagcaatggcacggaggtctggaaattgcatgagatgtctagtgatattctcggtggtttcagcattattagtgtgtggacctgctctttactggaaattgaataagggtttcgttggatctgctcgtagcaccaactccatttgtcctccttgtgtctgcgattttcctcctcctttgtctctcctccagattgctcccggtactgttgttacatctgggttttcaatttgattcataaaataggagactttataaatctggaaatgcttagatcgtgcttggaacaatcttgtggtttctgtgatggatctttctatcaaagctacggcttttaaattgtatacataagaagagtctcaatttctaatgaagtttcattcttttgcagggcttgcaaacctctctattacaggttagatctcgttcccaagctttgaaactctgtatgtattgtttcttcagtttctctagtatctctactgatttagtatgaatgagaatgcctatctgatgatttctcactgagaacccttactgaatcgtttgaaaacctaggaatttgtgaatcagtaaccaatgggtgcaactatatctcttaaagttagactttatttgggtttcttgatcagacataggagcctaagattctcttatctgttgccaattgcattaggaatacttttaacaaatagtttttttagttatctgttgagaagatgttcctcttttagtccatggaaaagtagaatatgatatatctgttgacttgtgttatgtatcaggttgtggcagcgatgatccagagctcaaagaggagatggagaagccgtttgtggatcttctcacagaagagctgaagcttcaagaagcagtggcagacgagcatagtcgtcatatgaatgttacacttgccgaagctaaaagagttgcttcacagtaccaaaaggaggctgagaagtgtaacgctgccactgaaatttgcgaatcagctagagagagagctcaagcattgttgctcaaagagcggaagatcacttttttgtgggagcgcagagctcggcaattaggttgggaaggtgagtaagtaattcactgtttagtgacttcttcacagtctactctgacgagtttctcaatggaagcaaactagattttctcttccgtatacaactcgtgagaacatgggaatcgcttaattcgcaaggcaatgtttttgtctcacatgttctctatatatgtagttcttttttgttttgctcttggctctagacactgctaaagaaagggttggccttgtattgacttttttcttcagatatatatttgtcagtcacactggacaaagtcaccgacttctgtattttattgttcatgtttattggcaaacgcaaccatcattttctcaccaggcaaaagcaaaatatataattatgatcttattgaacttggatattgtgttttttgagatgtgcatctgattgagacagcaagcctgatttgatttgtaagaggatttgttttgcagctaatgttggatgcatctgtgattatggtttaagcataagtgtgggtcaagagtcactaacaaagacttttgagatgtttaactaacactagaatttgtgaagagggacaagagcagaggaagagacaaaattagagaaaagtcaagaaagggttgacataatgcagcatatgatctctccaggtattacacagcaccaactttcaatactcattcatgcacaaaaacagctgcttttttctgtttatttgatttgtttatttttactagtgtcagccattaataatactctctttctctcgttgcattattctaatgctcacatggacagattccttaaaggtttttattaacactttagatctaccattaaagaacagatctcggttcagtgacttctgcaaaccgtctagacccatgtgggttgtccaaactctatagcttgaggctatttgttctatattcaacttattatgtggttatgtttcttttatgttcttctctgaagcttcctttgtggacttctgctgtttttttcctaactttggaatagtttttgtttatctctggacacagagatcgcaaattcttttttcttaaatggaaggttccatgaacaagcgaggatacgaatgcagtcaagaggatactgacaagctgccagaatcaaagagacaaaaagtgcctgctttagcaaggtaacttccttaaggattttctgtcattttctagttcaaagtagctcaatggttaaacatcacaactattgaggaagaacatgctttgttgtaagattcatggaggagaatgtgttccatttgaaactaagattctttactctttctgagtgagatttgttctttgttgagaggttcttttgtaagctctcaaattttagtttttatgtttccagacctcttgattatcttgcaagtttgttgattttctcatatgaaacaaactttttctagtgttattgtggaagctgtcaaagtagatagtctgcagaggctttgctcgtctttggagccgttgtttcgcagaattgtgagtttctattctacccctgatctagccacgtaatgctattatagtaaattgtgagatgcttgtggaggtgtttactgggtatggtgtggacaaacacacaggttagcgaagaagtggaacgagccttatcaaggttgggaaacgcaaagttaacctcgaggtatttgctccattataccttttcctcttgaaatggctctatgatctttgtagcgcttagtttctgattaacccaacataaaatctccaggtcaccagaaccaaagaggatccaagaccgcaatggaagaaacctgcaacttcactttaggacgcgaatgcctcctcacttattcacaggcgggaaagttgagggagagcgaggctcggcaattcatgtggttcttatagatgcaaacacaggaaatgtagttcaaacaggagaagaatcagcttcaaagctgaatgttgtagtgttagagggtgacttcaatgatgaagacgatgaagactggaccagagagcactttgagagctttgaagtgaaagagcgagaagggaaacgccccatcttaactggggacacacagatagtgcttaaggaaggtgtgggaactcttggagaacttactttcactgacaactcgagttggatacgtagccgaaagtttaggcttggtgttaagccggcttcagggtatggtgatagcttttgcattcgtgaagccaaaacagaaccttttgctgtcaaagatcatagaggagaacgtgagtttctaatcatttggattgtattgatgagtgttagttactactaacttggctctgtcatcgaccatcagtaaaattcattttcttttgacaatgttttgcagtatacaagaaacattatccaccggctgtacacgatgaagtctggagactggatcgaatagcgaaagacggagtgctacacaagaagctattgaaagctaatattgtgacagtcgaagacttccttcgactccttgttaaggatccacagaagctgagaaatgtaagcatattatttgttaatgtgaacaaaccaccaatattgccaaagatatcctagttaaatgttcttttttctccctgataatgtagttgcttgggagtggaatgtcgaatagaatgtgggagaacacggtggagcacgcaaagacgtgcgtgttgggtgggaagctttatgtgttttacacagaccaaactcacgctacaggcgttgtcttcaatcatatatatgaattccgaggcctaattacaaacggacagttcctatctctagagtctcttaaccatgaccaaaaggtaaagtgtaaagacagtcatatttctgtcttgatttgaaaagaattttttggtcataagctgataattggtttgctcacagatttctgcagacattttggtgaagctggcttacgagaactggcataaagctattgagtatgacggtaagctgttgaattgcttaccagttgccgagaaggaaataaaaagcttactggaaccaaaaatggtctcagcacaaactgctccgaaccatcaacagctgcataaccagaacaataggcaaactgtgcaaggtcatcagaatgcgattacctattcaccggtccctcaaccaatagattatcctcagtttgcgcagcaacattgcaaccaattattaccctcattcccttgcaacgtacaagactacaacaggtcgatggaaagctccaatgattcaagctcatacaatggagaagattggtgtccaccaagagctgcaggacaaggtcttgaagacattttcagcgaagaaatcagactaaggagttctgaaatgcttgagactgacgatatgcagagactgttgaagacgtttggtatcggtgtgaacactgtgggaacacaaggagggtttggtcagactgatgagtcttgttacggttatagcatcccgtaccaagctcagatcgataacacgtaccgaagagaacgtaatagaggctcggggaaagctgttgttggatggctaaagcttaaagctgctttgagatggggtatctttatacgcaagaaagctgcagagagaaggcctcagattgtggagatcgattgacaaaaagggatagagagcttcttgaggttttaatccgttgaagatttttcgttttcgttaaagcttgaagacagtttctgtgtgttcatcttttggatgaataatctaagagtagagagtggactttgctttgtattacatgtaacgctttttatgtttctctcttatatttcgtgtcaattttttacgtttgtgtcgttttcatgttaattatgttagcaatctatatctttctctaagtttttatattggaataagtgaacactatgacattaacttataacatattaactaatttaaaactaagttggcttgtttggtggaaagtggaatctataaaaaaatgaatccatcagataagcttcaaccacttttgccatctaatatttacttattttgctatataatattttttcagctattttgttagccaaccacttttaaatctaccaaaaacattcatcaatttattttgaaatattgattttcaactagtatgtttttatgtttttttttattaaccgaacataactaaacaatatataccaaaataaccagtggatacatacataaacttctaatttcaatcctaaaactgtcattttttaacaaaaaaaagttaacttctaatttcattttcatatcacctcacttatttgagttttaactttaatcgacgagattggttggacatgttgagtgtggctcgaggttctgacgtagcgactaaattaaccaataggattcattgcatttaagatcattaattaatttcgttagtaataccggtgtaaaccggaccgggattaattttactaaaccagacttggttactacactgagcgctccttttaacggaagagactgagacagtggaagagtcactcactcactcatcaaaaaatggcggaaaatgttggaagcgactcgagcgaattcgaaagcatctcttcttctcagaaatcttacctcaaaaactgtcctttcgccggtcacgaagctcttccgacaaaatcgacggattctgacaacactgaggttctcgggaaccagatttctccggcggttgttaaaactccgattctctcgttctcttctccgactagcctcgattctatcaacgatgacgtctttcgtactcctcctgagaacgcgtctctctcctctgccgctgaatcggaacccagagttggggtttcggagattaagctccaaggaggttcgaatctgacaactccgttttctatggctgagacgacgcttgtttcttcttcgccgtctcttccggcggaaaatgttagggtttcagagtcgaatttgaaatcttcttcttctacggccaaaacgacgcctgtttctgcttcaccgtccgtaaatgctagggtttcggagtcgaatttgaactcttcgtcttcgacgacccctgtttctgtttcaccctcagaaaaagttagggtttttgagacgacccctgtttctgcttcaccgtcagaaaaagttagggtttttgagacgaaatgtcattctgattccggtgattccgttcctttgtcttcttctccgccgtctgttgcggccgacgatgttagggttccggcaaagcatcttgattctgattcttctcctccgactgcaatcggaagaactatggttttagtaaaacaacgaatttctgcttctgacaattctgcttcttcgtctgcaagtgaagggaccaaggtctctaaaactgaaaattctggtgaggttttgccttttaaagaaattatcgaagctcttcttcgtaacagtggagagaaactcaatgaaagagatgataaagttagctatgttgagattctcaagcaatgtggtttgaaattccctaaatgatcctgattagtaagtattatctttctctgttttagtttgttctttttgtttctgtttcgggattacgcgttcagatctttccttttttgttgatatgaatgcgtcggggtaaaaagagttgggagctttttaatgttctgtagcttcaactacaagtaatgataagtattttgttcgaatgacaaaggctatatcctacaaagatgatttcttgttctactgttattgcattcgatagcattgtctgaggaaatgacgcctttgtgtgttgtcgcaacttgcacgcaaggaattagttatgtgtttctatcttcaaaatccagctctctctatcttttgctgaatctcaagcaccgattttgtttagtttccttgatgcttggctcgtcgttttgttgtttgtttggtggattgttgagagcgagtttctccatggcgttcatgaactttcgcatatgcttgatgtactcggggtatgtttccaagttgcaatgccctcctccttttacccacaatggatcatacttgtcctttgctagttcccacaatcgcttcccatgtgacatattcacaatatcatcttttgttccctgtagttttcataaaaccgagtttaatgatctctcatctgcctagtgagaaaaagtgatgatgtaaaatgtaaacttacatgtatgacaagaacagggcatgttacatggcgtatcttgtcaatgttctgcaaaattccagagtttgagagactgacccgatagtaataaccagagacaagagagatcaagcttactttgtacatatcgaaccagaatgtcattttgacaggatacagaactctgaggccggagagaattgcgctatgaagaacaatccctcttagtctctttactcgagatgctaagtgcaatgttggtccgcttccaacggattgaccatatagaatcatttcctcttgcatgatcccgtactcggtcctcaagcaattgtacacagcctcgatatcatagtacgtattgagctcagttggctaaagaacaatcaaaggttaaaccaagagccaaatcatgaaacgtgtttgaaattatctctcttaccttgcctgttgaagctccatagcctgaataatcatagctggttcaatcacatataaagaagttcaggttcaagttcgttcatcattatcaacaaagagagaagtgttttttgactatttgtatgtataaacctcataatgttgacgcggagatgagctcgaagctcgatgaagagatcaaccatttggccgagatccgcggcattgccatgtgaataaagaagagtgaatctagagaaagggtgtttccaaaacgtggcaatgaccttgttgccagatttggtggtaagctgatgaacatccatgcttttttctggtgttatcccggtgaacataagctttccggtctcctcgtctttacccacgtcgtatgttggtggcggtgggaagaaagcgaactttgcagccatgtttgacgtcacattacccatatcaattagtattattgttcagcaaaagggtaaaagaaaaaaactttcaatgagaaagaaggagaaaacaaaaacaaaaacccaaaccccaaaatctctccctccctctctctttggatctaagaaaagaaaacaaagaaaatggttaaatttttgtgtttcgtgggtttatgtttaggggagaggaaggaaataaaatggaaggtgatggtggagaatatttggcgggagaaagaagttgagctgtttcattaacaaatttaatatagattctgttatatatattaaactcagctacaaatttcaactgtgaataaatttgatgctatatgattttcaccatgaaatgtgatatctcttcattccacaatcaaaattgcaagcagctacagattttagcatatcaacctcattttaacacaaccatctctctctcttttggcacaaacacttgaaacccttcttttacctcacatgaactttctcgggtcagtttggtgtctcattctcagctgtttccgggacttcttccacgatttctggagtgtgtaacaaagggattggactgttaccgcgttcactagtcgagctactgctattgatcacttcactttccattggctttagagaaactttagggagtgtatctgcaggagcaataagtgaatgctcttctgaatgtttcggcttgttcagagctcgacagtgaggacagtagtaagtaatgtatgggaaatcctctttccgggcgagtcctgcatgttgagagaggaagagagacattgtacaattaagttatcaatggtattgcatctagtgtgtattagaagacaaaagacagagataatgtctcactcaccgttatgcatacggcagtttccacagatgagtgcatatgactgacttggatcttcgcctacaaggagagccgcaatgcgtgagatccagctaccatcatgagcagcatattcctgaggattataatgctcaaacaccatctgttggttttgttctgtgccggtgattctttcgcttgttccagaatggttagactcattatccgaatgatgaattggagtggtctcagcgctgttgcctcttgtatttgtctgttttcggttcctgagccctcccgagtgtttggcattgttctttcctgcggtgggctcaagttgggattcatctcctacaaatactttcaagcctgactcagcacccaacttggatgccagaacagttgcagcagccgcctttgcagctgggtcagggtcatacctctgatacaaaatagctcatgttataacaagttccagtctcaatagtgataaaacccacaataacaagtatccgttaagatataacagcaattcaattctttttaaagtttctgaacaaattgcaaatctaggctaccagtagaagaagtaattccagaactcaaaagtgcaggtcttcctgtcctttagtagtatcatttccaattaagtcaagttgggaggcatcacactaagaatttcaactgtaacacttaagttctagattcataaccaccctttatccaaacttacaatatagctttgcctaacacattgagccactagtttcacagttacaaagctagcgcctagcggaacttgaaaagcgaaaaagagagactctcaataaggataatccttgtataatggctgtactgtcctaaaggaattccaatacaaatttttgaatacctagctctttgctaaggttaaatttaaggtcatcttctaattcaacaaagacggataacttgcaacataaaacagaaatgaaaaatgatctaatcctacgacaaagctagaatcttttaagtgatctgtatctctatcagaactaggtaaagtagtgcaagcaaagaataacagcagcacacatcaaaacatgacaattaaaataatcaggaataccagaaacaccaatagaattcgaatgaactagcctcactcacacagaacaagttgtatcttacctgaataagttgctgtgtaatgtaataattggtcctttcctttaactcattaatctttcccaacatttctgcttgaagtttttccaaggtatgctgatctctgcggtcacctaaaccaaaccatttcacacacaacgacacggcttagacacaccaagcctaagacaaattcatgagcatataacagaagtaaatcacaagactcacacatcctccagaagccaacaagtgaagaatagagaagaaaggcaacagcaggtaaaagaaacattggcaagatcctgaaactcctcagtttccaatccaaatcctcatctctggtggtcatgattgcataactcactgcaattacctgttgtcaccaaaacatcaataactttcctactaacaataggcaacaaaggcatagacttggagactaacctcaaagaagacagagaaagcgatgagatttctaatgaagttcctccttgtaatcgatctacgcttcattctattccgaacagtcgcttcttcctttgagatatttttaagtctcttctcgaaatcatcacctctaaccctaaatatcgcattccaaagacgcgagaacaaacctttacgcttcgtcgtcttcttctcgccggaagcagagagtacaacggcggaatcattcttctcgccgccgctttcaaccacagttccttcgtgctccttctctcccaccgccatttctgattcctttacactactactttgaaaatcaaactagagtatctatcgttgatgatgaagttagaattcttcgtaaggattcgcctacttgccgcctgatctgggattcgttggagaaggaggaggagacttcttcgaatatcgtgaaggagaggccaaaatatgtgtgatgcttcgctctctgccaaagttttcttcctcttcgagaagccaaagaggaaacgcagaatttactcaaaactttttgggattatttgattaggggtttattggagactgtatatatgtttgattttttagaataatttgaaggtttagtgaataaattatgtaatattaaatttaaattgagtgtgaaaattgaaaaatatagaaagaatattaacttaaaatttagtgttatttaattaacgatttaagagatacaagtttgaaatttgaatgaattttcaaaataatttttagtaaaaatctataacttaggaacaaaatcttgagagttgcttatactttaagacaataatttttcttttttggtcggatttgagagtacgtaatttactttctactgaattcatcatattttttctgtcctttaatttacccataacaaggtgaaaacacaaaaaggttaaaaaatgtgaaaaatcaaaaggttattttaatttccaactatcaatcaatacgtgtttaggtgtatccatccacttccattctaaatcgaaatgatggtactatgtttatgttcaatacgtgtttagttgtatccaacaacttccttccataactaataaatggttttatgtttcattcattatttcacgcgcattctcttgccacaattccggacgaaaaaaatcatattcttttccaataaacctcacacaacaacacgttttcatcagtcaagattttgtattatgtacccatgaaagctatacatcgtatcaacaaaaaaagttctctacacgctttgatttgcttctacttacaaatctttgtcttctttttggcttatcaccatttttctctgtacacttatgttatatgaacaagaagtacttctctatctactctcctaatcttcttctcttctctgtgttctataagaatcctaaaggcccatccagcatgaacttccgttagtgttgtgaattggtgagagtgtaggcaaagacacagccattcgtactaaacctgcccacgaaaatgtatacaacacacataagtatgagtcgatgttgttaaggactcattctttctttggactaatctacctttgtggaatcgctacatctccagaaatgtgcttctatgggagacttagggtgaacttcaacaggattcattaatgggaaaaagagtggaaacagacattgaaagattcttttagctaactgttttttattaacacgttcgtgttttcatacagaaagaattaactaactttcatatgtataattcaacaaaaataagtatgataccaaaataataatcattatggtgctctgttcaatagaaggaaaatattgaccactatggtgactagttatgaacttgattggtgactaggaaaagatgataagaactagacaatttaccatatcttaagttttgtgagatttaagttagaggaacaagcaacttgtaagatattttggaagctagcttattactaatataagattgtgacaataactaaagtaagctatcaaagttcatcaccttgataataatattcatatcttataatcttaaagtaggggtttgtgcaaaaaaagctttcaacttatcaatttttgcaatttaatcatctacattaaaaaaatgcaaactaataatatgaagttaataataatacgcaatgtaacatttttccgctaccgttaagtttgtaattgtttgaaaaataatatgtcaaacgaagccctcgcgacgaagagttcaactccacctttagagtttttaaaatataatgtatgtgaacgtgcagacgtttacaatcttattatataaagtatggttttcaaagttgctaactcaaaggattgtgccacgtgtcaagtcaaacgatcagatgtttacatgtgtcattcaaaatttatttttttattctctaaaaaatagaaaatcttaaaaagtaaacaaatttacatatactaatttatatgtctatatatttataaacaattaacatttattcaacaaaaggaaaaataacaaatttgtctttaactcatgtaatcataagtgaaaatagaacattttgagaaaaatagcttagtttataggatttaacttttcaattattttcatttattaattttaactcatttaatattaatttgcatgatgtaaaattaacttacgagattacggcatatatagaaaatatattttcaacaatgtttggtttctaaatatttttgtggatttcttttttttattaattattagccctaggcgtttgggtatccggatcgggtattttgggttcgggttttcgggtttagaagtttaggacccgttcgggtaatttaagatttcgggtcgggttcggtttgggttcgggttcgagtttatttatatattgaaatatcaaattttgtgtgcaaatctattaaattacttaaaatttcaaaaatttccaaaacaacacgagtagttttgcttgaatatatctaaaaatacacaaaaataactaaaatatccaaaaaatcctaatattttctatatataagtataaatataactaatatatacttatatttgaaatatgtttggatacctattcgggttcgggttcgagtttttcagattttgaagtttagacccgttcgaatatttgaaaatttcgggtacacccgcctaaatagacgggccttatctagtatacatataatgtttattccgtattttcggaagtacgagctaaagttgcaaaaattgatgaagtggaggttttttttttttttttttttttttcttttgcagaaaaccctttaaggtagtaaagaaatagtttctaaattttcataattttaaagctctaaggataaaaaaaatacatataaaaaataattaaaaaaaatttaagctctttggtttataaatgtagaattattacaaaatgtatttacattttataagtaatacaatcagctatatttaatataatataatatacataaattttcttgattaatggtaaagtactcatttcttacctattaatgattacaatataatatgatcactttcaaattttttaccaaatatcaaaacccaaccaaagaaatgtaaccaaataacttttactttctcttacacagttcgatgattcacacatcctactgttcttcgatgccatcatgactctaatggtttacaacaacaacattatcctctctaagaaaaacaaccacacttcattttctaaatctctcggattccaaaacttcagacgctttttatggtgatttagtcacaattttctcgaaaattgacagttcttccaaattttaccttattttatttattttcataaaagggcacattatccatttacacaactcatacagatgattacaataacttaattccacaattttaccagtccaagcccatttattaaaacccatctcacatacccagtaatcaaaacctaacaaaggaaacctagctaaagatatttataccctcgtttcacacatctcagactttttatcgccgcggccgtaaacatacatcaacaatgatctattctctcaaaaaaatcaccacactctatgttcaagaaatcctagattccaaaaatccagacgtttatcatgatggttaagtcatatcttccacatttacacttttcaaagattgactatgcttttactacattactgacaggtaattctccaattgactccacaatcatatttataggggtattaatgagaattggatttagatagagttgattgattttaaaatttgatagatttgttaaatttttcaagagccttgttaaatttgcaggaagtatcaccacactctgtcttcaagaactcctagattccaaaaatccaaacgcttgtcatggtggtttagtcatatcttccatctttatccttttaaaaggttggcaatgcttctatcacattaatgacatgtatattctacagggagtatcacattaatgacaagtatattctatcacattaatgatagttaattttgcagggagtatcaccacatccgtcttcaagaactcctagatccaaaaatccagacgcttgtcatgatggtttaatcatatcttccacccttacacttttcgaaggttggtaatgcttgtaccatattcatgacaggtaattttacaatggtatccacaatcatatttagaaagggtgttaatgagaattagatttagattgagttgattgatttaaaaagttgatagatttgtgaaaatttcaaaagtcttgttaaatttgcagggagtatcaccacattctgtcttcaagaactcttagatccaaaaatccagacgcttgttatgatggtttaatcatatcttccacctttacacttttcaaagattggtaatgcttctaccacatttatgacaggtaattctacaattgtatccacattcatatttaaaagggatgttaatgggaattggatttagataaagttgattgatttaagaagtcgatagatttgctaaattttgcaaaagtcttgttaagttttcagggagttttgggaattgagaatctctaaaagaattatgttgtaaagattttaagagttctatctatatccataatatattacaatttgtgtgtttataagttaaattgttaggaattcatttactagtaacactagattgaaattaaattatatagtatcaatgaaaaccaaaaattttaataatgtacaatacattttgaatagaatttaaaaataatcatacccataaccataacaatggatttatagagaatatgagaatccataaaccaatatataagaatagaatctaatctttaaatttccatctctcaataacccacccaccccttccctgacgagctatcctttcatataaattttacgtataattataatcatacgtattcagttccacactttcacccatctacgcctaattattaaaactaatctcacttgtccaatcattaaaatccaaccaaagaaccataaccaaataagttttttaccttcacttatacacatttctgactacttttcactgccatcgtgactatgacgtcaacaacgtcctcccctcgcaaaattactacactcgattttcaaaatcttttggattccaaaattccagatgcttcttatgatggtttaatcagcttcacagagattggcaacacttttacatcattccttgaatatctaaaatgaagaaacatcatcatcaccaatttaatgagttatccttacccagttattaaaactcatctcacatgcccaatgatcaaatcaaacaaaaaaaactagctaacgaaaaatttatcttctctatcacccatctctggctatttttttaagaagaaaaggtggctagtaaaaacttcatccaaaagtgttattttgtctgtacctagcaatagatttacatccaagctaggattaagtttccgacataacagagagaaaaataaacgtatttcacgatgatgttttgacaaagatcatgcaattaccaacatagcaaccacgtttaatggaaatttcttacatttattatagattgcatagcaaagaaattgctaataagtaccatcaggaagatacaactggttgttccagcaattcaacttgaatcttcattttcttgttctcgttcatcatcaacatcattctttttttctttgcaacaactatataaacttaaaaaattccttataggaaccgcttagacatgacaagtagatgttttttttgtttttttgtataacaaagatgtttcgagcctaggtccgtatatcccttcaagccagggattatcgcattttatatggatccctctcaagtattactggaaccgacaaatagatacttcttacttgctaatgtgatatgtctcacctccaaaagtacgatcattccatatagtgaagtattaaccatcacatgaatccttacactgccttccaaatcaacaatgtagagcgactttccctgctttgaacgtgtatctaagtctcggttttccaagattctgaaagagaatacatatgaatatatttcataaaaccatatatcacatagtaataatcaaattaaagaagaaaaaacattggtaattgtagtcatgtattgcttaccttttgacttcgttaggatcagtataatactcgccttcccccacaaagttgctagagaaaacttgatccagaagattccaatgtgttatccaatgaatgaaactgctatccattgtagcacacttatagtgtctgcataaaggttcaatgtcttcgtctacttttgtttttacacctgaagtagtcgctccaatcttaagcccactctcatttgcattgcttgcacctcccaaattggtgaaagttatcatcaaattattaagattctcatcattgttaaaagcatttttgttatccaaattcataaactcatagtagaaccccttcatggcttcatcatcatatatcaactctcctaggtctgcctagccacaacttgagtccctaaccaacagatctaatagctgaaagtagcttgatcccgaagaattttgagaggtcatcgaatggatcccaataatatcagtgttggtccgtttatgagactttttcggcggtagagtgttaatgatggttttagacttagtgcccagaacccaaggaggcattggagaacagttttggttaaacctaaaggaagagtcttcattctccacataagttgatggagaagtgtacatctacaagatagaattaggacagactaacaccagatatgagctcaccaacagaatagaagagaagacatgcgacggtcgagtcatcgattgtggtctgtgtggttagattgcagaaatgaatcttgatggttgagtagagctcaccggcaccaatggattatggaacaaagatgatgaaggaattatttgggaaagttggagaagatatgctacgactaagtagtccactgtggtctaaggctgaaatgcggtgaccagactagaaaacatgtcaatggtggtccttgtgaaagggttgacaaagaagtctagggagacggtgacacgtcggatctctggcctatgtgagtgctaaaacaattatggtattggttgcttaaaggtgtcatattgccactacgactttgagaatggtgaatggttgtggcaatatgactttaagcagccaataatataatctttttagcactgatggtggctagagaaccggcatgccactgtctccgtagattttttttgtcaacccttttgcaagtcccaccattgatcaattttccgagcgggtcaccgtattttagcctcagaccacggtggactactcagtctttgcctaccatctccaactttttcgaataagcctttcatcgtcttcattccataatttgaaggtgccagtgagtttcaattgttgtcgttcattttttgcaatccaaccaaggatcaaagtcgatgactcagttgtcgcatgtcttctcctctattccgctgtgagctcatctccgatgttaatatgtcctaattttttcctgtcgatacttctccatcaacatatgtggagaccgaagactcttcttttaggtttaaccaaaactgttcaccattgcctttttgggttcatgtcactaggtctaaatccataagcaacactctaccgacgagaaagtttcataaatagactgacactaatatcattgggatccattcgataacccgtcagaattctccgggatcaagctaccttcagctattaggtcttgttgttggggactcaagtcgtggctcagaaggccttggagagttgatatatgatgatgaaaccatgaaggggttcgattatgagtttggataacaataatgattctaacgatgatgaaatccttaatagtttgttgataacttttaccaatttggacggtgcaagcaatttgaatgagagcagatttaagactagatcaactacttcaggtgtaataaggaaagcaggtaaagacattctatgcagcctttataggagtgcttcagtggatacagtttcattgactagataaagcattggaatcttctgggtcaagtgttttttagcaatttcgttgggaaaggcgagtattataccgatactaatggagtcaaaaggtacgcaatacgtgactacatttaccaatgttttttttctttaatttttattattaccatgtgatatggttttatgacatttattcatatgtatgctcattcggaatcttggcaaatcgagactcagctgcacgttcgaagcacataatgtcgtggtacgttgttgatttggaacgtagagtcgagattcttgagatgacaaataccactatatggaatgaccgcattttttgaggtgaaacatatcagattagcaagtaacaaccatctatttgtcggtacttgtgagggaacaatagaaaatatgttagtccttggcctgaactgataaatgttgagaattaatattaatatattaatttgttgtttatgtgatttttctttcttttcatttttatgcaggaagaaaaatttgcaattcaacgatttcgagcgatgtaaactatctaaaattgtttgaagcgaattttaattaaaattttttatgattggttttaaatgcttacaaccgcaacatcgctttttaaaagataacgtttgagggtagtagcgggagaaccgataagcgtatcgtatatggacattgttggtgagaggtagaggttcttgagatatggggttttaaagattgtctattggttgataaagatcaacaatcattttgattatttgtcgtgataatttggatttatatatgaaagaaaaagagtaatatgtaaacatatagcatgtgtgtgagtagagtttttcttaagaatattgttttagtaatatttgattaatcggtgagtttgtatatcactatattgaaccgagcatgttaatatagttagaatgtagttttgaaaatatataaagtttagaaaacatatacctagtgaatcttacgaaatataaattagtttagaaacctatcatttggaaaccataaacctaccgccgtaatttcgtggctgcttttggaggattgtagtttaagttactatgttgtcgtggcacagcctaaaaccccaataccttctctaacaaggaaaaaatgcacttatcacaatgttttagtataaaaagttaataaatacacaaaaatgttaaaatactaaataactaaccaaaaaaaaaatttggttcttgcgtaaaatgtgtgcttggttttatttgctggattagataaatttaaagtaactcatttattgcaaaccattcgaaaatcaagaaaatgttttcactcttcgttaatatgttttaatctctcttctttctcatccgttaatcttcctaccaaacctaattaagaaccagagattttgcaaacttgtctgagattcaaaattgaatttgaaacacgagtgaaaaatatgcgttcaatggttacaaaaaaactgaaatgtgtaaacgaaataaatatttttatattttgtttaaagactgagtaagttcacagtcacacttgtgttttcttccgcattgttcaattttttaatcatcttttttgggtgtgaaaactaataattagttagggtaactgaaaactcacttggagaaactcctttgcaggataactaatagtcatgcctacctaagcgtggatactatcggggtgatcagcctatacagtttttacactccctacatatcaagaacgtcaattcaccgaataagattcaatgatttgtgttggcttacaaaatatgaagccacgttgaggttttgaatctttataaagccacgttgaggttttaaatcttatatgtatatgatccatcaatcttgtggaatcctatctttttggaagacgaagcttcaatcatgtttcacttccttactctttcgttgataggctcatgattaaaaacaggactcatgacatattttgaacaacaaaaatatatataactactacacgtttgcttcaggtgtatttcatatccactacaagaaatatcgatattgttattgtgtttttttccaaaagtattagcacttcactaaatatttttgggctaagtattggtggaataagtgattttcgcttcccgcttagtgatattttatcttagcgttgttttaatgctattatacaataactaaaataaaattttatttttccgataatttaatttgaatggtgttttggtgggaaaaaaaaaatcatttttcatagcagttatagaaaatgagctatcttggtgttctatcaatgtatataattgttatagtgatattaaaaaagagttaaaacctaaagattgaagactcatttcagtcaacacttggatctctctcaccttgcatataggcgagagtgtcgtatcttttacttccttggtacatctcaagggcctattactttaaaatcaccagcacgttaggaagatcttgtcatggttccaacgttaaaacaaagtgataccattttagagaagatatttgcaatactcctaagaccaaagcaactagtaaagaacttttaataaatagagatcggagtggtgaacaaaaacttatgtattatgtgtagatgattcaaggcaaaaatttacccgggattttccactgagacttcgcttgatgatccacataatctgatccttctctttagccctcccatatggtcacttctggtatatctagtattttatcattgtattgagcatgctgaaaaaaaaaacacgaaagaagagtaaaataaattaagaagatcatacagttgaattaggagagaaaacatataactaatcaccccaaaaaaaaagaaggaaaggagaagcacctatgtatctctgatctctctatggatttatactttagttaaccctcattataaaaattgattgattactaaattttattttatttttcagtggtaagataaatatgttgacaacaaatgaaataagatattgcaggttaaattaaccaaaatgaagtaagatattgcaggttaatttaaaagtttggttaattaccaaaaaaaaactccttttgatagtaaaatactcgctattatcttttgttcgtcaagatgtttaattaaagctttttaatcaaaatcttttaaaacctgattaaaaacgctactccaaaataattaatgtgcgagggaaagaaatgggcctttaataacagaaatagcactgtgttcattttttgtcgttttctcaaaagctgcttagttccgacgaatcctccgcacaaattcaccggcgacgagcgaaatttcgagaatcgcggcgactagaagtacaaggatagtgatacgaagatgactaaagcagtagatggactcacatttccgatgtcgagagtatcggagtcagcttctcgacttaaaaccatcatttccgatatgcttcctcgctttactgacgattactccgacgacctctctgttcgtcatcttcttctttttattttcatcttcctctttgttctagagacgattcttaggtgtttagttcgatttccttggtttttacttgtgagctcttgtacgcactcttctctgctcgcagaagtaacattatcttcgtcgtctctctaatttatgtgaattttacccgatggatttgatattggcgcttctcacctactttttcccttatcgttttgattgttcgatgcaaattatcatcgattatcgtttagcagctcttgtagaggttatgttgcataatgattttggaaaatctgagttacaggatccgtaatagggctatgtgtatgtaatcactttgtgtggactggtttcatcttgttgaattgtaaaattgatccgtgggagcagaaattgcaggttgatgagtgtttttgtgtgaagatcaggtaagtttgtgtttactgatgaatcagcttgtttcaggagtatgttacggtgcttgtttgtaatggaaagagtcagagacaggcaagcgaagatttggaggcatttcttaaggagcaatcttggaaatttgttgtctggtttgatatttgcatcccctctttgttggcttgatacaggtattggtgacttatatgacgattttgataggtgtttttattttcagcttgtgggagcttctagtgaagtacttctctcaaagtaattctgcttctggacctaagactgatgttgactttggctctaatgatactctaatcaaacaaggtttaagctccagaaagtatgatgattatgattgcaaagctgccgatggtactaattcgatgaatgtaagactacgacatctgcttctttcatatgtgtgtatgatgcaccagtttttttggtcatggtcttaatgtgaatggctttgcaggaacagctgatatcagttactgctcccatagatgacattgaggctcctgtatcaccaaaagttgaaaaaatgaagatgtcacgacaagagctcattgatagcccttgtacaagggcacggcgaagaaagaaagaaaattggaactcgtctggttactctagaaaagtactgcgctctgtcattgtttcagccactcagcaaccatgtgataggaatcctgctaaatatgaaaaggttggaaggttaataatttctggttctgaattggtttatcaattgtttatgcaatttccatctcttaattgatccttgcacatatgtgaagcagtctatgaatgaaaggagtagaaccctaaagaagcgcccatactcaccagaaagagaattggattctcggtttgctccttcaggtactattttgcttcttgacaagttatgatcttctgaatatatgacgagtgacattttgcactaataaaaacgtctcaggaagagctgtgtctgcaagataccatgatgcatctctacaccaagaaacggagcctcatgttagtgtttgggatcgtttgggccgagcaagctccgaatgtgttcttgacacagaaagccgtacattgtctaagtttggtatccagacacgtgaaacaaaagtgcatcagcagcatggaccagtatttcctgcagcgtatagtgaacaacatagcgagatatttcaaagagaagttcttgcagttggttacaggcacagagttccccaattcgataaagataggaaacccaagagtgaaactatcacatccactgaaccgcatattgcatataacctcagcagaaagagacgttatggcatggtcagccccaattcaggagagtttagctatgttccccaatataagcaagctgaacaagattttgaaaagccaagcctgctctcccatcagtcaacaaagcaagatattttttcagtacgttatatgatagttatgctttgttgctgtcattcatgtgaatatagattcctcacatttcaaatgatgctgtttcttctttctttcatcaggaaataaagaacgtgaaagaaaagatgcaagaactagaactccgaattattcaatcaaagcagttgaagaaacagaaagttgaagaacgcaaaccctcaccacaatctggtatggaaacttggtacagctaacatttaccctccatttagaagaagtcatttccgcttaactacttccctgactgtcgcgctgcctcgttgcaacttctttgcaggcgaatcacagtatcaggaagatgtctcagaatcaagagtcatacatgttactaacgtaatcctacagggttccctcttatcttttgtttttgcattatctattttccttaatacacatgaatctaagattgagaaattatccaattctctcgaatgcattctaattttgaaaactcactaacacttgaaaacatctggaacttatcaggtatactatgcagcaaagaaagaagctatatcaatgttcttcagcagcaagtgtggagctgtccaaaatgttatagttgtaactgatccagtaactcgccatccaaaggggtaaaatcctctcttccttctaacatcttgttcgttgcaatagactatgcacaaattcacttttaagcaagaaatcgtccttatcacaaaaaaatcttctcttctccagtactgcttttgtgacttttgctacaaaggagtcagttggcaaagcagtagctctgagcggcacaatgttctattcaagacccatcaaggttaaattcaattcttctctatctccaaaaccatattacttgtttctgacacaacctaagtaatccaacttctctgttttccaacattccaggttcgcatgcacgtgatagcttctggagtagtgtcagcagcaccacagatagttactggaagttaaacccaaatgaatggtaatacacaaagagcctacaaacatcaccttaacaacgccgttgtacagtccctacgtgtaggaaacaagtgaaagtcacaatcagttccactttgatcaaattttagctcactgtgaacatatttcagcccttttgcgtttcatgagacagaaacatagtggtggatgatgaattgactgagaaagcttataagaaagagaagcgaaggaatgctaataaacaaacacttgttgggacacagagttcccactttcgatttcttcttaatcaacacaaacgaaaaaaagaaaaataaaactagaaatcagtaagtctaaaatggtggtggtggggttacttacttctcctatcttgagaaaacaaaatacatttcatatttttatagatacacaaacacacacagagacacataactgacacacaaacttatatctaaagccctttttcttatatcttcttcttcttctttctttctttgttattttcttgagggggggattatttagtcaatcgtcatcggctggctcaagcaacatctgaaacgggcttttctcgctgtcgtcattatctctgtttctgcagcttcaagcagcttcacaacctccacaaaacatggacggacttctggattagcatcccaacatcgagtcataatgtcactcagcaccgggagacaatcgtttgggactgttggacgcactcctctgtttacaaccgcaaacgctgcctgtacagctgtcatgttctggaacggtaagagtcctgtgattaactcccacagcacaatcccgaaactatacacatccactttttgattgtaggctctatgctgtatcatctctctgcatcaaaagaaacatatttttctattaatgtaacttgcagaaggcaagaatgataaagtgcgttaaaaagatcatgtgtccctttggaaacttacggagccatccatctgtaagttccagtttctggtgtcattccttcggtttgaacttcaattcttgcaacaccaaaatctgcaatcttgatggacttatctgctgagatgagaaggttatctgacttgagatctctgtgtatgaagttgcgtccatggacataagccatacccctagcaacatccaaagcctgtttaacagctaacttcaaagggacggctcggttctgtctcctagtcaaaaactgcctcactgaacctcctttggcgtattcagtcactatacaccacaccattggcttgcgacatgcaccaatgaacctcacaatgtttgggtgcttcaaattagcaagcatagacacctcttgctgaaactgttgttccatgaactgtgccttttctgggctgttctctggccgctcaagtattttgatagctacatcttcaccgttgtatgtccctttgtataatttaccaaaagccccttgagcaaaggcaggacccatgttgagtttcctcagatcaatcgtccactcatcatagttcgtcagcccttcagttggatacctggtatccatcagtgcttgagccaaagcatcatcattcaacgcatgggtaactcttcccgggcgaaacacgctttgaccaaccgagagtgagtaatggcgtacaggcttcaaacccgggtggccaataagagcatcgctggaaccaacgctactgttatccacagacattgagacagatcctccagcgttactcgtctgcatactctccatggacatgtttgaaccttcattaagtttttgataaaactcttgcgtaaaagcatagtaattgttgtcgttgttgtgatgattcccaacagcaagcacgttgaactttgctccttctagcatcttcccaatctaagattcacttgttacgaattctttgaccaaactgcaagtacacacaaataaaatctttagactcaaagataaacacaaacaagaagcattagctcaaaaactggaaacaaagtctcattaacagcactagccatcagtaaaatgatcttactatcatcaaaattaacatatcaaatatgaaagacttgcttcaaaaatgaaaacaagaaccttgaaacaaaaaaaacagctttcgctctcaaagaccatgcacatacccaaattaagacaaacgagctagtcaaaacgaagaaaccaactaggttaactatttaccataagattcgaaaactttcattagtagaatcaatacccattacagaaaaatcaaagtttataactttaaggtcctaacagagataaagctacagatcatgactctgagccaaaacccagaagaaaaaacataagaaaaacgcagatccgatgaatcaagtactgaagaagaagaaattaaggtttacctagagctactaagcccaataaaacagtcgattacacggaagaacacatgaaagacgcttccttctcacccgatgagtaaacgatcgaagagaagaagaagatagtgaaattacaaaccctagttcatcgaatcgcaaaccccactaaacatttttttatatacctccgaatcaaaaatcaaatccagaggttgtgatgaaatcagaaacctaagaaatgaaacgatgaaataagtagaagaagaaggagaaggagaagaagagtctcagtcgtcgtttcccatttactttctcagcttttgattttttgtttttccttccttttttgtttatttataattttgatccttcctttattggcaaattcttttctcactcccaatctcacttacggagagtgtatcacacgttctttaggataagacacgtggcttgtttcaattcggttttacgaggttgtcgtgtgaggcggcgcgttgccgctttaaagctacggttacagtggtcttttctgattcacgcttgtcctcccttctttacacaaattattattaatttgcctaaaccagcaactttttttttgccgttataatttcttttctcctctttttcctcgaaaacgtccatttgtttttctcatataaaaaatagaatctcgtattttttaagacctatacaaaataaaaaattataaaagcataaattgtttatctctttacataattagaattcggtaaaagaaacttttgaaactagggaacaaaattcttatgttgtgataaattaagtaaatgtttataaatgaataactcaataacgtgaattttttttttggaaaattctctaaaatactatattttttagtttttgttcttaaatacaatcactattttttttctaatagtacaacaaatttaatattaaaatgactcaaaaattcttttaaatgatggaaatataaaccttaaattagaaagagctaggcaactcaaatatacatattttaattttatttgtatttcattttggttgaataaatatttttatacaaaaccttgtgatattattgagaagataaactagtattggcatttttggaataaaaacataacagtgtggtatattacagtatttctctaacaaaaactaatgttgaattaatgtttatgtccatatttacaaattaataaaataatacaatttcaacatcatatttattgtaatgattgagatttttaaaacaaaaattaagagactaacgaactttttttatagagccgacatttaaaaagatcggagttcgatccaaatttgtcatacatgtcagaggttgatatgtttctgtaaagttagttgtttgaaaataagaaataacacgtgtgagaaatttcattcgacggtttcacttacattaaattcgtttcatcttcttttgtctcttttcccaaaagttatgatgtaaatgctccaaatttgtcatacatgtctaagaatgatatgttcccttacagttaactgattgttcctaggaattaacacaaaaattttgtactttaaggtttccctagcattaagtatcatcttaatctcgtttttggtttcttctctcccaatagttaagacgcaaatactcaacaatctattgtacatgtcaaagaatgatcagtaccttgaaagtcagttaattgttcacaagaaaaacatgtgtcaagaatttcattctacggtttccttgtaacacaaatgctacaaatccggtatacatgttagagattgatatgttcccttaaagccaattctttctttgtaggaaacaagttgtgtaaataactttgctcgatgttttccttgaatcaagtattctcttgatatccatttgtatgttcttttctagaactgaaaacgtaattactcaaaatatcgtacatgtcagagatcgatctgtttcatttatatcagttattttactaggaatgaaataacacgtttagagaatttccctatacggttttccttgcattaagttcgattgatcttcttttgtctcttttctcctaaaagcaaacaacgcaaatactccaaatttgtcgtatatatatcaaagattgatatgtacatgtccgagattgatatgttcccttaaagttaattgattgttcacaaaaaattacatgtgtgacaaacttcactttaaagtttctcttgcattaaatattctattaatctccatttgtcgggtttcttgggtttcttcaaatagtttaggcgcaaatgctccaactctaccgtacacagttgattgttcacaagaaaaacaagtgtcaagaatttcactcgacggtttccttgtgttatactccctctgttcctaaaagtttgatgttttgagtttttttcttgtttcacaaagattgatgttctacatcaacatcattattattcttattctttgaccaataaaaagaggagagaaatatagttaatattattaaactaacaaaataataatattaaaatgtaaaagttggttttcttaatttggatgaaaatcccacaacatcaaatttggtggaacagagggagtatatatttttcttcgattgtctctatcttccagattataaacccaaatgcttcaaatctggcatacatgttagcgattgatatgttcccttaaagccaattgtttgtttgtgggaaacaagctgtgtgaataacttcgtttgacgatgttccttgaatcaagtattctcttgatatccatttgtatattcttaattgatcaaaatattgtacataacatcataaaaatgggatatacaaatgtactaattgtatatacgcatcatctatgctttatacctgtaatgctaccaagtggtaattataatatacaacattccttcatccataagggatatagtagtacatactgcaacactagtgatcttttttgtttgagtttgccttgagggcaaacattaatgatcttatacaaactcattaattgaattaattctttgttgaagactatgctaatacttggtttaaactgcaacatttggttttagtgaaatggggatacctaagtttacggtctttgtcaagtttgttggtacacctcgatctaaggactgcattatctttgacatgtgttgttaaccttagcagcatataataaaggatcagttcctccatactgaactagatattaagttacattataagcaagatttgtacaattttaacactttctccacaagggaaagacactctattgcatctccttatactacgagcatgcaaattgaggattcaagattgttgtctctgtaagtaatatctgaatcatgtaattgcctcttcttgtgtgtagattagtttttctttactgaggcactgagatagaagcaccactcatatgttcctgcaaatggttagtaaagaagaaatcagtaggtgagtatagtaatatattcgagtttcgattttcgcttttagtggttctcaccagtttcaaagaactttggctaccagttggagatggtagagggctattgccgactactacagaatgtgatgattcatcagcaagtgttcttaatctatttagctcaggcaaaataactttagcaagatcaggtctatcttttctccttagctctgcacatttaagagctaatttagcaaactcttcagtgtcttccattggccaatcagaaacaactggatcgagtaaatcaaccaaagttcctttctctagtgctctctcgacataatgagttagacccattggtggttttgctgttatcaactgtagaaacataattccaagtgagtaaatgtctgatttcacacccaacattcctgtttgttgatactctgggtcgatataacagaatgtgccagcggttgaagtcatgcggtattgtgtcactgtgtctgcaactgttggagggaccaatctagctaaaccaacatcagatatcttgctgacgaagttacggtctagcaagatgtttcctggtttgagatcacggtgaacaagaggctcaggtttagcttggtgcaagaacaacaatccagtgcctatctctgcagcgattctaaatctcatctgccacgagagaggtggactgtttcctagtctgaaaagacgatcttctaagctcccattagccatgaactcgtagactaaacatccgcattccggacaagccccaagaagtagaaccatgttcggatgcctaatgcagctcaatacctcgacctgtgttttcaaaactctaaaatgagaaagaaacaaatgaataaggagaaactgatgtgactttattacaagatgtcattacctcttgttgaaattgcgatcttccttgagctgcatcgggacgaagaactttaacagccactggtgtatgatcaagataacatttgtagacaggtccataaccaccttctccaatcttatatttctcagcgaaaaactctgttgcaagctcaatatcttcaatggagtacttcctatacctgacatctgagtttgctaaagcggtaagagcctttgttttctcctctgactcttttaaagctttcatttccgcgttgactctcttcttagcctctaattcagcaatcctttgagctgcttcagctgcctccatagctgcttttgactttgctttctctttctctgcaatggctaatgctgcttcctctgcatttctcgcttcttctagttttctctcttcttctaacttccaacgttgaagctcagtcgcctacaattaccaaaacatgttttagatttttgaaaaccataaacacttgtttttacagaaactcttaccttttgttttgctgtgagtgcttctttgcaagctgtactatacatttccatagtctgcttcaactccagtttaagcctcctcatctcagcctctacatcatcctgcttttggtaattttcagaatgtcaataacactagttatataccaaacgattaagattttatcagtcttactattgattgagaggcggatgaaaatctttcgctctcgaaatcagtgggtgagttcatatccactgatctccttccatagttggaagactgatcaaggctagaactatagtccatgtctgagaaatttgaaagcctaggaggagttcggcttggatcattgttgtcatatagagaagggaagatacggtcaatgcttggtcttccggaactgataaaggatatgtctgattctggaacagttaaatctccgtatgatctaccattgcctcttcttgtaaaaggagatctgtgtttcatacatggagatttcagttttatgatcatgtctaaatgaaaacacacacaagagtggtttttacctgaaggactctgattgatcgtctattgacctgcgttgttgatcctccatagacctgcgttgttgatcttctacagaccttcgttggttagactcaaaagaccgtctatcggctgcaaaaaaagaagattaaaaaccaagttttaaggtgaaacaacaagtgaaagaagttttgtgtgttttaacaacctcgcagactgttagcggaagtagaaggcataggttgaggaggctttaagctaggtggttgaactgaactgcgtagaggagcagtcatgggtgcagaacgagaagctgatctcattgtttgaatctttcctttggaaatgatataaaccgtgcagaaatcaggagcgttttttgttatgctgcctggaatatctgtaggtttgttgaacctgcaaaattttcgtaatccaacattacttgagaatcaagattcagccagagagacaaagaaggcaaggaagtggttattttttatacctgagaaaaccacctttgctggaggaaccaactactaaaacctcaatggccgcttggtttacgtattcgaccaatgctttggcaacatcggactcctcaagcaacacatcttggcattgaatctggacagttttcattgcacattaacgagataaaggatatatacaaaagaggaaaacaaaaacataatgtaaaccaagaaactcacgtctttgcgtgtgcagaagcaacggaaaggaagaaatatttctttggaaatgccttctggatctctgcataccaatgaagaatcttggctcagctctgaaacaaaatcacaaagcatcagaaacaaagaaatcgaatgaaaacagagaaaagaacgaaaacgaagaagatagggtttgtttacttgcagaggaagcatgaagagaagcgctattattcaatggagaaggtcgaagcttgacgtggacaagaatgacggattggcctcgctgcaacaaattatcaacagcccatttaagagcgtgttggctgcttttgtctttgtctattgcaacagctacaactccgctagaccctccttccttgactcccacgttattgtttttcggcatccacatcttcgtctctctatcgctttctctccttcaggattcaagattcagagcaataaagaaacttgagaagatgaaatcgaaagagagagagagacgtgttttgaggtaggttcaaagatggtttctctatttttcattttttgttaagagagcgaaacaagaggatacagagaaaagagagtttctataaaaataaattttctcttgtttcgtctctatctctctatgaacgcttctccttcttctccgcctctccttcctcttgatttctctttcctattaactgaaactttcttcgacgatttacaataccaatttgtgtatagattaatttccacgcaagtaacatataaggtatgtccaaacttccaaaaaagaaaagaaaaaacttccaaaaaaagtaaatgaaaaagaacacagaaggagaaaccagaaattccaaagcacgtgactggtttcttatggaacaataaaaacatggttatatactgttaatacataccacttgcaagaaagactctgtggcccaatggataaggcgctggtctacgaaaccagagattctgggttcgatccccagcagagtcgatttctttttgctaattttttattgcgaattatttgaaggctcgaagcttaaaaaggcccaaagaatctcatgaagattctgtttttggtctctctcactcacaagtctcacataatcgaaagctcgcagaagtcaagaggaagaagatgagtggtacagtgacaatgcacagtgtcttcgtctacggcagtctcatggcggacgacgtcgttcgtctcctcctcaaccgtatccctcaaaccgcttccgcaaccctccctgatttgtacgattccatctctgcaaaatcgattttctttgttgaaattgaaaaaaattgattggtgattttgagatttttgcagccatagattcagcatcaaaggtcgtgtttatccggcgattataccagctaagtctgataaagtctctggaaaggtcaggatccgaatcagattcttactcatgccttaaggattgggaaattttgatattgttgttgtgcaggtgttatttggaatcacagatgatgaacttaatgttttagatgagtttgaggatgttgagtatgaaagagagaatgttcaagttttgttaacagtgagtcattctcagattcattctccatccatttctatagagagaaaaaaatgtgttgttgtttttgcaaagattcaaagatgcaagaacaagaacaattcatttgttctctatatttgatttgaatgcagagatattgatatatatgtttacaggatagttcagacgagaaactgcaaacaaaaacctacgtttgggccaagaaagatgatcctgacctatacgggacatgggatttcgaggttagctatcttaatttgttcatagattaggctctctggatcattacttgtttgaattgtgtatgtatatatatgctttccattgtactttccacaggaatggaagcaacttcacatggaaggtttcttgaagatgactaaagaatttgctgaagagttgaatttaccgaaatccgagatatgactcgccgctacattcggatcagtaaatgaaatctggtatagtttcctcaatgaattagtcaatatattcttggtgttctctctaggaagggttagattcttcttcatgaatacacatacatgagggggatttggggttttgtggtattacttaattcaactgataaggaataagaaaacagctacagattcttgtgcggtatgttattatacaatacacatatagacatgtgtttagcttcgattgtttgttcgcatttatcttttacgagagctcaattgctactatgtttgagacgaattgtgtgaattttccacaatactagtaagtaataccaaatcaagatgttattggaaattataaagcaaaaagtggacaacaaatgtgttgtagatagcatcaagttttattagctagggaaggtcatatgttgtagacaatgtgcttctatcttagtacagaagatagattattaactgaagcatagtgaaagcgagtggcaaccaaagcttcaaaacaaagaccctgcaaagtataccaaatagacttaatagaatttaaactttgggctggacctcccaaaccttgagaaactatggaccaagtcccggatttttaattccacagatttgtcatttgtgtatccgccacttagttgctgttgagctgtccatagcctgtgtgggtactgtactggtccctactaataccagcaataatcgaaattaatgggccttcctacgatccattatcagcccactagttactgtagcggacggactttgtgtgaattaaccgccacggaagttggattgaggaattcaggaaagagcaaaaaaaaaatggcgacttggataacgttacagcctccaatttcatgttatttacggctgatgccatcatcagcgccgtcgccggcttcatccacgtcgcgtcgaaaacaacgtcgtctctttaagccatttcgatgcgttccacttcaagaacaagagcctcagctcgatcagtcgcagcaggtaccaaacaaaaatttggacattaaaaatcgatgaagttgaaatcggatctgacaattgattgaggatttttcgtgaagggagacgacaatgctgtgattttgtgtgaggattgtaacgggaaaggatggttgctctgcgatttctgtaaaggacagaaaacaaatgtgaaatctgagaataatcgaatctatcgacgatgtccaacttgtaaagctgtgagttttcgtaaatttcgattaggttaaactgttgctaagtaatgtatctgtgaaactttggattggttatctaaatctgggaacttgaatgatgtgattataggtgggatttgtgttgtgtagaaaatgtaaagtgttcaagtgtgtcacatttcctaactcagaagacggcgatgaacttttgttctaagagctccttgttctagcaacactcttcttctccaactaaggacaccatttgagttttcaggttcctttctttttccaattgttatatatatatattgtctttactcatatgtagccatatgtatatgcacattgtaacattaatcagactagtgaatagtgattgcattggcttctttactgatctctatgttcatgtgtgaagctttcctgattgtatattgttatatgtattgtctttattcatatgtgtaataagcacattgtaacattaatcagactagtcattgcattggcttctttctaacctttcctggttgatttttgtctgtaatgtgtctcattctcatgtagatatttaaatctatttcattgattattcttaaaaaatgggatttccttgtcgtttaacgtataacctcgacacccatctttagagcagaaaactattgagtcaatgtcgtacactcccaactgtttttatgattccaaggcatatggtttgttcttgttaatcttctgctggatcatgctgtctttaagtttatagaaacctgcaattcattattctcgatataaggttcaggagataagtgcacatgtattaggcgattcgttctagatggtgttaaatctcaaggtacagatgtcatgtggtgttttccgttttatcagatctctatgttttctgttttgacttttgactctcattaatcattttggcagagaactaacatgtaatgtgattttatgaacatcttactcttcctttcttgaatcctgtttggtttaggggattgtaaagtcagtccttttgatattgccgtactcttttgagatgaacgtatatgcatgtgatcacaataatgtagctagttagtttatgtaagaatttttctgtgactctgctattagcttattatattactaagcatccgtattttagctttagtttttgtaagagaagcttaggataccgtacttttgcctttgaatagtttaaaaacaacattccacttggtgattaaaagtaccattccgtaattattgttatccttacattatcatattattttaaacctctgattactttaacataactctgcaacttccattcacatggttgttccggaaagaacgcaaactgcccaaatagaaacatgaaccattctttctattctttttttgttctctctctctctcttcttatttcttaataggcgtagcattttggcttattatgagcttgatttctgcttagagttaaacgacaaagtgcaaatgtttaattcgtatgactcattatacctctagttgcataagggtctatctgctgaggttatagatcaacttctatagtattccaaactaataaaatcttcggttaccataaattatcttgcctacgtgatatgtttctactgacttgtgctgcaaatgcagacgactggattacaaaggatctatgaaaatttgtgtaaaagttcagatagtgtttttgcttgattcacttattcagtatttgattttttattgtaccacgagtctactgcatttgtcatcaggaatagatggttagatcaatgggctggtgggttcttgtgagaaattccaccagagcagagaaatatcaaagagccgttttaagttttcatcagtcagaggtagtgcaacaaaaattgaaatcagtgcagagaaagaataaagagtctccaggaacagaggtccacatcacggtttcaatgatctgtttgtacattccactatttagaaatctctccccttactcagaattaagaaattttaaagcacacaaatccatattcctagagaaaaagtgggaataagcagaatggctcaaattagcacaagaggaggaaaaagaagatgcagaagcaagcaatgaacaaaactatctgcacattgggctgttgtgaggttggtgtgaaggagtcttaggacagtctgatggatgctggtaactcgtcttatcatctgctgctgcattgaacttacattcctgcttagctgttattggcgtcaccaggtacccttcgttcttctcctccattatcttcaatatgctctcaaaaacagaaacttcacaaggaatcctcaagacaccggcttgttgaaacccgaactcttcttctgcctcacgcagaagaacatagaaagcttgatggctgaggtactcggttggtattgtgtacctcttcttctctaacccgaccgaaacagctagataccctttaggcacagctgttacatctgtaaatgacagtgtcctcttcagaaacttgatgctcttgcttcccccgccactgctattgttgtcttcgttgttgttgttggctgcttttgatgcaattgcttgttttcgccatttcttgagaagctgttgaagcttaacgatctctctgatcttgtttgacttcttggcttccatggtggagatagaagacaaaagacaagaagtttggtactatgttttgtctagcgtctgtctctttctatgtgtgtagtgattaggacgtggtgaatattgagaatcggggatatatagaggtggtgaccacggaattctgatttaattagttttgtttctgcttaaaatattgtgctaatcatatgctttggttttttttaatgatttaaaccaacttgaatttgttgacaagcaaaattaagcagcttgaacttagaaaatgatatttaacataacctcaaattttgtcaccaaaatcagacaggcaaagctggctcaagcatcgcttaaatccctgtaaaacgcaactatgtaattaatattgagatatacttgttgctttctgactctgatttcattcactcggcagcattctcgtgctctcggctgctgttgccaaatcttatggtatctttctcaaaaagctcatagtaccgttgtgtctccatcagactttcattgatgtaagtcttataggtactactaagatccataatatgtaaggcctcacttgcttctttcccatcataccatatggctctttctctttttccacctcccggtactgaataacagcatgttgcttgctacaaaatgtgtgattagtaggaatgtcggatctttctctcacgtccaaagaggtagcaaatttggtaatgaatgcaaagtgtctctttcagtggttcaccatccttaaaatgataaagtctccatctttctttgggttttctattatctacgggattattgaagaggagtgtgatacctttgtatatgttggtttcttcagcaagtttcctcgatagctcaaaacatcgcacaccatgtttttcaatcatcaaacatgaatgaagtagcagctatcgagattctctctctcgtccggtacttagccaacacccttcctccgaatctctgaatgtcagattgatgtctcctggcacttggaggataatctaagcagacatggatgggtcctaatcgatcaagatagtatcttccatataggtctcaagagtttgagaagatgtctttcaccgtttcatgcggaagttgactccttactttaagcaattgaatgcatgatcgtaattagtgatatatttggagttttcgcttccggttactctgatatgatatctttcctcgacaactataacgaatgaccaatatttgtaatagagatagtctattttcgatctctcatttgtttctttctttttttaacattacattttttcatagaattctaatactcacagattgtttaatgattttttcttacaaaaagtatcattcagataatttaataaaaatggtatcgcagtgcctttatttacctttaggagtaagttttctttcttccgatatcctaaattgttcgacacgtgtcaatcacgaaaccacaaccaaaaaaccttgtcgtcttctccaatcataaaaaaaaaaaaaaaacagtgtcccaatttgatcaaacaaaacaaattcataaattcggagaagagaacgaaaaatcttcttgttggcaaatctccggcgagatcatctttcttattttgttccacggaagtttcagacatggcggccgcgaaactcgtggcgttgttacttcttctcgccttggttttcaatttcaccacttgtatctttgccgacgctggaatcgacggcggcgatgaaccgaaacttagatccgacggcggtgatatcgaattggatcagcttaatgctaaaatccgtgccctaggttacactcagaactttacagttacttcaattttacttctatgtcaatcgtgaaaatttgctatggcttgtgtgaatttctcaaattaatttttgttttcttcttttttggttggtgaagaatctcagattgatgataaaaccaaggaacttaaaggcagagaagagttagtaacagagaaggagaaacttcttcaagagagacaagacaaagttgcttctttggagactgaggtttcttcactaagggtatgcatgcatcttttagtgtctcactgaaattgcttccatgttcagatatagattgcctttatatatcaatctttgtttccagaaaaaaggttcatcagattctgtggaactgttgagtaaagctcaagcacgagctactgaattagagaagcaggtgagttcattatttgagaacccatcttttatatgcacgtaagtttctaaattctacattatacttgtgaattcaggttgaggtacttaagaaatttctggagcagaaaaacaaggagaaagaattgatagaagctcagactagtgaaaccgagaagaagctaaacgaattgaactcgagagtggagaaagtatgttcattatacatctcttggttcattttctcttgacacacattattattcatttcaaatcatttaaatagaaagtagaaagtatgttcattatgcaaattttcacaatctattcctgcagcttcacaagacaaatgaagagcagaagaacaaaatacgaaaacttgagcgtgctcttaaaatttctgaggtatgacgacgctcttggattaagtttagttcccccttaactttcggtttctgcaatcactctcgactcttatcaaaataaaattataggaagaaatgttgcggacaaagcatgaagccaccacaaaggctaaggaactgatggaggttcatggggcgtggcttcccccttggtttgctgtacactggagtagttttcaggtgagattaatagattttatcttttacgactttcttgcatcatagattttctcaattaacttggacacttcctggactcagactgttgctgggacacactgggacgcccacggcaaaccagttatggagaaagttactcaaaaggtattgttaaatccaaattgtatgttgattacatgactctgagagcaaacttatgcctaactaagtttgatcatcttttaggtgacgttagcaaaaaatcaagctgaaaaatgggctaaaccgcacatggctaatgttaaaactgtaagtaacttacaggcaatgtgtgttattactcaggaggctcttatggttatgcttacgaaattctatttccagaaatatattccagccataaaagagactgttaaaacgcatgttgagccacacgttcaaacactatctaccaaagcgaaagaggcttaccatgcttccaagagtgcggttacaccacatattgtcaagtttcaagaacatgtagatccctattaccaggtgaagtatatttttttctatctagatattaatctttcagctccatcgatgatgacaatatgcgcttaatttgttttgtttatgctctccaggaggctaaaaagtttagcaagccgtacgttgatcaagtggccacagccacaaaaccacatgttgataaggtgagagctaccatgaagccttacacaacgaagactgtccactattacaaagagttcctggaatctgcctcaacttatcaccaccaggttagaatcggaggcactgtgtataatttataggcattatagttatgagtagtgtcatttctagaggaatgtgttgtcttttaatctgataactctgtatatatgtgaagcttcaagccaatgtcgaaagtaaactgaagagccatgagctgttggaaccttttgccaccaaagagttcatttggtttgcagtatgttctctcgtcttgcactctaagacaacatgcttttttgttgcttcctttatcagcttaaaattgataaactgttcactgtaggcctctgctttgttggccttacccatcttcatagtgtacaaattcctctgttcgctcttctggcaagtttcttataacgaatcattatttataagatttaaattagttttcagtatattgctctgtagttcttaaagatgctccatccttgattccaccaaatgacctttcgtttgtttgttgtatgtttattgcagcacaaagacgaagaagcctatccgacagtctcatcaacatactcgccgtaaggccagaaggggtcattctgacaaatgaagtcacatgctttgtgttgttatcacttcctcgtgctataaatattagaggtacatctcactttctgcttaaatacacgttgcagaacgggtcacgaacaaagaatttgaggttactggatagatagataggccaagccagaacttactttccatagaaatgagtctgtctgatgttgatatgtgattaatatgccagtttccgaatcctcaatgcattgtctttttgtcggatgcaaaacgctttcatattgtgtagaagctattagcgactagtgactgaggttaaaactttggactgatatgtgtctaatgtttcttgatctttatctacattcttgcaggtaaagacgggttttgatgcgttctctgtgagcctcacctacagtctatatgtttccttcgttgcgtatgaaagaaacagcttatgttagaggtatcttatgggtttttttttaatctcgctgtgcaaaagtgttcttcactctctctgtttttgagatgccttttgaatataaagttttcagtcttttatacagagaagattgacatctagaggaaatctactaagggcttggtttgtgtattttgtgattcatgtggataaatttggtacttgtgccattactctttaaaagcaatcactctttgtcttttatctttttgaaaactttttctcaaaaatcgaaaccaaattgggaattgttacagcttttattttatttgtaactaaaaatcatagagccagaccataattggtttgactagtctttgattcttaatattttcctagaacaggtaaacaaatgcaatagaaagaacaaccaaaaacgttttaccaacaagtaaatggaaacaatataaaaaccataacttaaactgacaattaccaatcaataagatggccagtatccatccaagtccatgcactggctcatctccacatttccaaacccgttttcgccattgtacgaagcactaaccgcggcaacatcctcaagagacacaacaggaggcggctggaccagtgcaccgccaaggttgaggttgagccctgagacaggcatgtgggtgtagttcattagctgctgatgagaagagtccatggtggtgcttgtagaggcacggaagactcttgagagctcagctaggtgaacggcgtttgccatgagggattggttaatattgaggctcgggtgtggttgtagatgcggtgggagttgaaggaggtctgatgagtaattaggattattgttgttggttgatagtattgaggctcttgtgtggttgttgtggtgatgacttgtgctgctgctactggtgcttatgtatttcttggttgcttctgttttcttgaacactctacacactacccactcgtcttgctgcatttacatgttacatcatgaaaaatgaaatgagaattgttgagtttatgtatattcttcttgtgaaacactaatcccacaaaaaaaaaaaaacattcaagactcgtatttaaatcatgaccatgacataatgtatatttggtagaagaataacaaaggaaaatagtgtaccttggaggttctatatgaggacttggagtgaagtcgatactcatgcatgacccaacaagtcttctccccacgaggagctcgtcctctgtaaaagaccaaagtcttcttcatcccgaccaactccgaggttgtgctattgaatatctctttgtcttttcctgtggttttccaatatcctgtattcgtcgccctattcgtcctcactcccgtcgggtacttccggtcccggaggctaaaaaagtaccattcttttcctcccattttcgccttctctatcaacattataaatcagaaactttgtgaataacttggcgatttagctgactttttttttatcaaatatttccaaaattttagcacgtaactaacaattatgtttcttcttttttgcttctgtgaatgatgataataaattgttttagtgatgattaatagagtaactcctttataaagatagtattgttggtatattagatgaatagtagaaaaataaaatagcgaaaacgttttgagttgaataattatgaatgttaaaaaactatgtttatctagattaatgatttgttatgttttttttttaattataattttaacatatgcatcatatatagcagaatcaatttctaaaacgtgaagatttgaagaatggtaagaaaataacgatattgcatttctttaaagtgaaattgcattttgtgtggaggggaacgaaatggacggagacacgaggagaaaccgaccccaacacctatacggctacactcatgaactagatagttaagcaagtccagaatcaactatgagcaattcgaaatacgggtgacaaaagatacgaatcaggccttcaagcttggtttgcctctaggatttaaatgtaaatcacttgtctattaattgctttcaaaaaatcttcagcatttttgcatttcgatgtaaaaggttttttttttttcttaatttaagattttattcagaaaaataaaaataaaaagtaaagtgaaaatgtaaatgtaaataagtggcctgttgcggattattgaattttttgttatcttaaaaatggtttagtttggtttaaatataagaaacaaagatattgttagtttatcggattatggatagaactaattaaagacaaaataagtagataagaaattaacgtacgtacggtagtgaatgcatgacttccgttcatgcaactaatgtttgttaggaaacttcattgtgtgactttctattttaaagatatatgcttactatttttttaaatcaccgagttttttttttctcacagaaacttaaactattacatagactttttttttcttggattgatatatatatatatatatatatatattccaaagattaacatttagtatacatctagcctccgttcgataagctcatgtctataagcttatatttagtacaagaaaagagttttgtagattgtggatgtgatatctaaccggtgtacattttttttacactaactgacttacgattagtacgtcgccaagaatgtactcatgatattatggcattttcattaggcaaaaaatatagatagtgggtgttatgaacttttaaatgcttcccaaaatagaaagatcatttaacatgaacactatgttttccgtttaaatacacacacatttatgtgttatgtgtgtacaagtagtatatccatatacacatccatgcgcacacacacaaacacatatatatggttcatttaagtcatgttactcatgtgtgtattagttgtatatgtgtaaagatatccaaagcaataagcaatatgcatatataaagacacatattcctttggatatctttaaatccaaataatataggtcttaccaaattttaaagaaatcaaagatatatatcaatatatatatatattatatatacatgtatcgacataggaaaaaaaatatgtttattcatacatgtgatcttttaatttgtgtgtgtctacgaataagagacttaagataaattaacgtaccaggaagctcccatggctcggacttgttaagatcaacgtcagcgattgctttcccggtgaagttttgatcggcaatcttattaaccaagtaatatgagattagctcctcatccgtcggatgaaatctgaaacccggtggcaaagcttcttcttctttcttatgctgctgatgatctccttgttccattttatatgatctttagtttactccaaatccaagaacctttttatacctgcttaaaacacatagtaacaagtctaagtttcacatagatcctagcgttctacaactgtttatccataagacaaaggtattaaaggaggaattcgaaagaagagagaatagtaaaagatcgatatatatgtatgatatgtatagggtgagaaattgggcttacttgtatagatgaggaaaaaccagacaactaaaacttttatgagattagggttttgatggtatttatatatcatgagacaaggatgacttgcgactattcttaggaggaaaaagatgaaggaagacgacaaagagtagggtttttttcttcttactttatcgtgaatgggattaaaaaacaattacgctaacacggttttgattaatttataaatacatacacatatttatcaattctaagttttgttagcatatttagaaaacccaattaccatctaagtttgaaagacatagaattttcaataagacgctgtaagaatataatttacatttcagtgtttatgtgattgtttataaataattaaataacattactattgtatggggtagaaattattatgtagaaaagggaggaaaatgtggaagagagtgtgtgcatgaagctctcacctaataagggtcttcaagtacaaggtacatgcagctaaacctcacacgtccaaattttatcctttgtttattttgtgtagttggtcaagaaattctccttttaggacccttattaattcatcttagcttatacatatatacagatatacttatacacacacccacatgtgtatattccctatatatatgaatgaactatgttggtgttaagaacggaaaaaaaaaaaccttatgttggtgttggtgtcggatcacgcacgagccggtccgttttgttgctaattacgactcccaaaaaaaatcatatgtttggtttaggggtcaatggtcgatggtcaaagaatcaaatggtttatatgatttaattcaaatataaaatggtcatgaataacacatcaaataaagaaagaaggaagactacccatatatatggactatggatggatccaagttttctcactgtcttttccacgtgaacaattttgttccaaatattagctattcttctatataattaaacacaataaaatatttactgttttcccaaaaataaattaccaaaaaaggacacataataattaatgacaattttattttttgacttttttttattttgtccatttatgtttttattttattcgagttggtatatattcacaaaaaaattgattattcacaacttgatcacgtatctgttgagaatcaaattaaagacctccaaagaaaagagatttaatgggaaaaaaaaactcccgatgtgactgtaaactcttctcctcaacaaaacttgtgacatttttgttacctcgacaagaaaaaagaagaagaagaagagaagttatgctcgctgagtgcaagcgttgagttttcttttcaagtagatatatcagtttgttgaaagtaagtgttgagtttacgtttaattggaaagtgaattttagcttgctaaaattaaatgttgcgttatctcttcgcatataaatagattgcagttctgtggatgtaattttgagttctatcttcacacaaaaataatttagctcgttgaggctgttttgagttcaatcttcttagaaaagtactaagtattgagtcatctcttccgctcaagaccgcaaaatgaccaatgttagttccatatataatatatctaagatcagatatggatgagtttgcgtgtgtgtaatttgagtctccttcaattatcttaaggatttcatgtgatcattcaacaacccgctgattaattcgctccaacacaaatacatatttggaaatcaacctagcattttaggtaccctcacttcaagatcattttgtataaacgtaatatataatcattctttacggtccaaatattgcggacacattgttggttttcttccaaactttttccgacgtcttgtcctaatatattgattttgcccgacaaaaaaaaggtgtatagagtaattaatcaatggaaacctaacatttaactttgaagttttgaaattccggtttgactgactagtggtaggatagaaataacttgaaacaaaacaacaacataacttagaaagatttagattcatattctcataattagaagaaaaaaactagcttagactccgactatacatcgtcaaaagtacatggaataattgaacaatagggcttactagatatttaatattaataaaataaagaatttgaatcaacagttatcgcaattatcactataagaagtaccattgtataaactatattgttgctcaaattttctttgaaatacgataacattttattttattaccaaatgaaacatgccaattttgaaaaaaagtcatgccaattataccatgagaagatatattatagtatatcttcccacatattcttatatttcgtagtcttccagaaaatgtagtaggtttaacttatcaaacacttcaagtaagaaaatgaaatgcgtctttaatcaacgacgaatgtcccgatcattagaacctaccgttctttgttcattttacctctaatgtttcctacgaagctaccattattacgtagataaccattttttattaacaaaatatgtaaaagattgttataatctgtttacagttcaactttttcaaatgttaggatatgctcacccgtacaagaaattacgacacatttatctcatcatattatctttcgcgtatatgattgggcaaacattctcactaatctaaagcaaatttgaatgatctagttttagaaaaatccgaaccatgcatgttaatagaaaatattcactcgagagcctttaaaattttgaaaatctcattttatatgaaaacgaccttctttttttttactatgattgttgattaattgggtttatttttgcatcatatagcagcttcaattttttcttcttttatttccaatatacttttttattttatctaagtgatacataacctttttagtgttaatacatcttaatttagtcattatgaagattgcatgacagatctacaaaacttcttacagtgacgtagacgtagtttgattaattttaatacatatttgttttggtaacacctacaaacttcttacaacatgatccaccgatgaccgatgtgtgaatgtgaacattaaccgatttgtgtgaatatgaacattaaccgatttgtgtgaatgttcactatatgcatggacattcatcaatatcccaaagttactttatcgtgtacgtatactttatatcgatatatatctacttattatgcacttttatttaatttcataaaattttgtgcactttaatttctttctccatcattttgattttcagaaaaaagagcatgaatcagttatttagtccaaaaagattgtaattttacaacacaaaaatgctcccaatataagtttaagaaagtatcatcccactatattttacttcaattgtagttttgaatttttcgtttgtatggagttgtagcatatttttataatcttaaaacaatctcatataactttgtggtggtgagtgggtcatttgaccccaaatttttttttattttatgttatttaaggttataaataaattaaaaaaaaatagcatggagtcaattaacccactcaccacaatttagctctacatgtgattatatactacccgagttaccaatatttcatatacatgtcgacatttacatcaacatgtatatgaaatatcggtaactcataaatcactagtaaattacaagttgatataaacatatctacttaatcgagaaaatgacacattcatggaagaaagtattgatttgatgcggaattcatgcttggtatgctacttgtaacacacttcaaatataattctggtatttttaccgtacgataatcaataaaagtctttgattttgatttgtaatttgtctttatctaaatttaataaatctttgcacaaatttgcaagcaacaatctttcgagatggacacgtacctagtagtccaatcccaacagtatagtatatatcgacttaggtggttaactaatgacagattccatttcttagctaaattttgtttttaacctatttggctattttatgttttgactcttcgaatactccctatgttccaatttccaagtagtcttggactactcttggcttgtttaaggtcttttcataatcattaactatcttcttttaagtatgttttactaatcctgaaacgttttctttccactgattaatcagcaacttctgcaacgttttctttccattgattgacccaaacagcatgttgtgctaatctttagaaataaaacgtcacgatgtgttatactgatgatcacttaaacacacgccttttattatcacagcgaccataatcgaacagtgtcagtgtctttattattcatcagttaatcttgactgtccattaaaaatttgatgacgtgtccttccaaggtaacttttaaccttctaacgtctttttaactaaagtaaaagtaaaaatataaaaaaagtgaaatatctagagagagacagagagcccatttggtgcggaggttgacagagctttagttccgtacaaatggcgagtaagaaggttgacggagaaggaaaagggaaagctatagcgaatacgaggatgcttcgaagcatggatcgaaagactcgaagcgatactaagcgagatggttcttcttctaagctcatgaagatcgaatctccggagaagaagaaacggaagacgacgaaagcgaagaatgttggagctgcgaagaagaaggtaaagaaagaagaggtagctgtgaaaatcgagaaagaggaggaggaagatgatgatgctgcagagaaagaagaagatgacgactccgataagaagaagattgtgatcgagcattggtaaacgaaatgtctctctcggctttggtttttttcttttagagtttctggagaaaattgggggaaaatgtagtagcgagtatttagggattttgttctccgatattgaagctaatctttggttttgtacacaatgtgtcattcgcctatataattgattcaatttcgttgcttaggttgaaatgtgatctattatcgtatttggttatgtttcttagtgtggttttgattgatgttaggtttcgttatgttgctgatgtttgtttgttgttgttttcctgaagcaaacaatgcaaatcattcaaggagagggctaatgaggtgaaggaaggtctagaggaagctgttcctggcatcattgtcactgtgaatcctgataaggtagtgaatcttttgctgcagatgtatatatttgtcattgatgcttgttgtttatgattgtttgtaccaatgtgtgcattaataagctaattctttcctttttgatctgctttaacagccaaggcgtggttgctttgagattcgagaggaaggcggcgagacattcatcagtcttttggtaagtttttcactctcatacttgaatgtagtatgccagttagtcgcacttatgtgagtgacttgttccagttggattgatgtttctcgtcgtgtctgtatctattcgcataacatagtttctttgatggtatactttaaaaagtgaaaatcaactttattttcttaagctcacacgaaattgaggctatttttgctgagtcaactgatcaccaatgaggttttgttagagcattcataaaatggcctttggttgtttgctttttaactgaatcaagttgagtgctaagttgtttgaaataagaacaaactagcagatctgattgttagtgactaggtgtacaataagaaaatgtttgctttcatgttctttattctcagatgtatatagaagatgatgtgattttcttatgtaggctatgaagcgcccatttacaccgatgaaggaacttaacatggaagaggtcattgcggacatcgtagagaagattaagtaacacagctagtaggttctaccaatgccgagtctttcgtttcctccttggccctcggctaataggcttcaatatctgactatctagagcaactgcaggattttttaggcttaattttgatatattggtgaaaaccatttgagcacggtttcgtcgtttggtagtgcttgatcggctttgtgcagtttctttatgctaaaacttcctgatatatatgggattaagtctgtcttcgtaatgctagtttgaagcaattcgtttcgtttcatttattgttggattgtgtttggcgttcaattacgttacggattggatgaatgaagataaaacatttagttacaatgtggtaatacaagcttcacaggacagaacatcacactttcattgtctaatgataaatgattgaggtacaataatgtgagtagaaattgttagtgtctttgatccacttcgtatcaccattgcctctgtctatgttcgagtctcattatcagtttaatttatcctcgactcgctgtcttaaatcatcttagaacccaacaaagctagccacaaacccgagaacaaggacagcaccgaagctcaaaccggtgttagaagcagaagaaggtggttcagcctcatcagctgctgccatcttcttcttgccagacttatctggagctggagctggagaatcactttctgatggtgcagatgcaggtgcggtttctggagctaaaccaggaggagcatctgcataatccccttcatcagcaggagctggagctggagtggctgcacccttcttgggagatggggccggtggtgaagacatgggtggtggtggaggaaccttaaccggagacccgagtccaggtgccacaatgggcatgctgatctggaccacagagagattgtacgggttacggaaaacggttgtgatgtattcagcggtttgaggagcgcctttcacaccagaaccaaagtaaatctttccgttagatttggtgcagttgaggaaaccgttttgctgttggcccaaaccggtggactggtaaagggtagtgagcaatgtgctcttttccttgagagccttgagcttaagctcatcaaagtagtcaagaaccacatggttcataagaatgttcttgacctcttcctcgggtctaccagagatggaaccgatagcatcgttgttaagggccagcacggtgatggtctgacgtttgttgataattggtgtgagctcggtcttggcaagaagctcggtcatggtgctgaattcagggtatttctcgagcactcgggttatgttaaccgctgatacaatggatgaaacagcgagtaagatggtgagacagaggagagaagaggagaccttgagacccatctttgggtgtctttgtttattacccttattattctatagtaaaagctcaaacctcaaagcctgagtttgcaataagaggatcaggttgggtatatatacagaccttaagaggagctcaagattaatggtggagagacatttacttatatttgttttggctaaatttgaacatgactttattgttacctctatatttggctttagactgttttatttttacctttggttctgaggtttgcgttattgatacagagccaacgtagacaagtccatcctaatctttattaagtcaattcttcaacaacttgaggtccgaagctagaatcaggaagttgtgacagggtcataggatgttttattttatttattttatttttgaagatatgttttaccaacaagaaaaaaggaaatacaacaataaaaatgcttttaagaagataataagaaagaaaggacaatatggaagaaaaaaaaggaaattacattaacgcgttagaacaaattatcctcaagagttttcttgtttatataaacataacattacaccttcacttctccacaatttcagatttcacaacaatctcctctcccatacgactaatcttttctctctatctctgagttttgtctaatttcactacgatcgacgatggaaactgaatcaatcaaactcgatgttcaagtaacgactacgtctcaagatccgtcgttagggttgttaagcacggtaataatcactcttgacagagatctggaggaatatgacgagaatgttgatagcatcaagagcctcggatcttaccctgattcttctactcccgacgagtcactaatcattctgaaactcccaacctccgaaccagactacatctatctaactctccgtagcaaactcaaagatcatctccacgatcatgtcttgtccgaagaaatagctgatcagattttcgaagcccaactaggaactcaaagtattgatcagtttccgtttcaacaacctttattcatgctagtctccgtcaaattgacacagaagttatacacctacgcgccttgtaacgcttctccgttggcaacagatttgactaagagagcaaagtagaagaatcgaactcgcatctgtttcatgaagattgtgtcgttactcatgttctctgtggggaacctgtttacgaacaacaagagtctaattagggttttattcgtgtgtcgcaagtctaagtttagttttaatctctgtcgtagacgtttaagatgctaattagggttttctcattgtctatgtattgatctcaatacctttttgttgacaacattcaatgcagtttactttaataaaactcagagtctcaatttgaaattcacttaaaaattgtcattacaagtttgatacttgtatgatacacaacattgatgttaaaatcgaatttttattcagataaaagacaagtgaacttgaagaactaaaattcagattctcgaattgtaatgcttacattacaagtttgtttcttgtttttaacaaaaatcttgattggcaagcaacataaatttttatctgaaccaagaacagtattcgtttagaaagatgaaataaacaaggaaacaatctaataccagacttaagcaggcgttcattgttacgggaagcgagatgttcagcagaaatatcggcctctgcgaagtgtgtattgtgaatttgtgattttgagacatgttcctatgtgcctgagggtctgtgaattcatgccctaagctttcaacttctatcttcatctgagacatagcagcaggaccatgaagcttcttttgtagaagccttcttagcctttgacactctttttcaagtcttgcaatctttttcacaccttccagatgctgcttatttgcgatttccgctgacttcaaactcatgtttttctcttcattgttgcggatctcaatttctctctcagcaaactgaagattagtctttcagcttttccacatcagcttcagctttagacctctcctcactaatctttactatcatctcagatcgttcttgcaacgatctagtgagtgctgcattgtcagaagctactcggtgaagtccttggctcaattcatcgatcttttcttcaagcatagctttgatctttccccagtgagtggtcttagcaagagtcacatcttgcagcttctggtcactcttatctgcagctttaagagtgttacagattcaagttgacgtttaagtgctaaagaacaaaagacaaatcagtaacaaaaacatctttaaacagtctgtattttctaaatttctaatactaacacacaagaattgctcacataacatctcaagaactatgaaaggttttgtgctctaacctgaaacagctgcttcagcgacttttccatgttaaagaatcattctttagtcgtaaactcagagtaagcatgattgagtctttctttaagatttaacttcaacttcaaataatttggcctgatcctctattttactcatacgtgtgtatgactcgatagttatctgaacatagtctgtgttcttacacttctcctgacaatcaaaacacaaaagacttacaaatgaaatttataaattatcaaaactgacacattaggactactaatctcatataaaagcagagatcctgattctccagagaagctataggacatagaacaaacaagagttgactcatttccaacaaccggtttcacagtcgtggctttgtcccaagacttgctcttccatggccaatctttttggtagttttagcttcatttttttggtatatatatatatatagattagtttcggtttcgaattttacagttggatttaggtgaactatattggttggaaactcctcttaaattgatatataggattaaatgttttacataagaccctaaaactttcgatgattgcagcacataaaccactcttttcaagtatgttgaacacattagcgttttggataatccaattttctacacgaaaagcaacttttcacttgaaatatgtttttgccagcttaagtcagagaaaacatgaatactatagaggtctttaaaaagcatttgataaaatattaggttgctcccaagtaacatataacacaattagcacatcaacatgatgataaccagaaaaaaaaaaaaaaaatcaaagagattgtgaaatatcacaatttatctaacaatctctttattattgtaacaaaatatattttggttattagttaaagtatttgaagaactactcttgccgtcttcgggacgcacgcagtgggctagtctgggcccattgggcttgggatacctgggttatccaaaaaaaaatatatatatatatatatatattttggttattagttaaagtatttgaggaaaatcaaacaacacaatataaaccggcaaattacaataggaaaaatggtttggtttaagcactctggtataacgagatgttttaccaacaagaaaaaaaggaaacaaggtaatatggagaaaaggaaattacattaacggttagaataaagaaaggaaattacaattaacgcgttcgaacaattataatcagagttttgcttatataaacataacattacacattcacttctccacaatttcagatttcactacaatctcctctctcatctaatcttttacgaatcatctttctctctgattttttgtctaattttcactacgagaatggatactgaatcattcaaactcgatgttcatgttcaggcttggtctcaaggtcggtcattagggttcttaagcaccgtagtaatcagtctacatagagaagtcgaggaatttctcattaaagagaaagatgatagtgtcacgagtctcggttcttaccctgattcttcttgccacgacccactaatctctctgaaactaccatgttttaaaccaaacgacgtctttcaccgtctccaaagccaactccacgatcatgtcatgtccgaacagatatcttctaagattgtcgaagcccaacgacaaagaagtcaaagtttttactcacaacaacaacctttattcatgattgtctctgtcaaattgactcaaaaggtatacagtgttgtcccttgtatttcttctccgtcagcaacagatgtggaccaagaagaagaatcggagacttgtgcaatctgtttggagaatatgtcgagatctgagaattattgccagatgccttattgtaagcattgttatcatgaaggatgtgtcaccaagtgggtgattggtcataataactcttgccctctctgtcgcaaacctgttgacaaatagcagagtctaattagggttttattttgtggtctttagtgactttgtaaacttagcttgtttcggaagtgtgtttagggttttcacttttatgtttcattgttttgtctagaggcaaattagggttttcagagtttatgtatctgtttttgttggtaacatgtaattgcagtttcatttacaagtttgattctagtatgcgacattgcaacacaaaacgctgtcttaaaccaaatatagtttcagattaaacaaaaaatcaactttgaacttttgaagttggcttaccaaattgaaagaaacaaggaaacaatccaacaccagaattaagcatgacactaccaaagtttcagaagtgaactagacgtgatcctaatagttctggatattgaaacatcttttaaatcaccagacaatactaatgactctatctacggattaaccaaactctagatgactattagatagatcaaagctccacgtgcttgaagtgatactcatcgattgtcgagtatattagaccatctccttccagtgattgaacaacgcccctataaacacatcagtaaaaaaaacaaagcaaactcatgagctcaacaactctgaatgtaataaagagagatagatgttataaggagaaagaaagaaaaaaagcatactctagcttgttttttgggatcttcaactgctgagcaatttcatcgatatgtatcccctgttgtcttgcactgcagtgaacagaactattattagaccagttttttaagtggagcaatgggggcagcaatgagaaaattcaaactcacgtgcaagcaggttgctttagatagtctagaatcatatcatccaagttcttgcgcccattgccatcattgttttgagaagaaaccacctaaaaacgagcaacaataatgagattctatttctaagtacagaaacaaatgtcatgaagaaaaccaaaaaaaaaaaaacttggtgaattcatcatacagggttcaatagtgttgcctggtttgtgtttgatccaccttgaaatgtggtgttaactgactgagtgacatcaccgacttgttgtctctattgagaaagcacaagtcagagagggaggttcgattgcaaattgtgaacaacacaatttatcttttgctatattgcattttctttacctgtgattcagagttctgggagtagaagtgtatacactcaatgtagtgaaaagtaacctcattgaagtccataataggcctgcaacacaaaacagacgatttcatataaatatctaacaaagcttatacagaacataccaacgtctattgccaatggtaacggaatcaaaagcatttcacaaccaaaaatacaaaacatacctcacagagaaaacaagaagctgagttttgccctgaaaagtcttcaaatgaccactgaggcgcacataagttccatctctgtttcacagctaacaattagaaaacacatccaaaaccaaaaatgtgatctcaccacataaatcaaacaaaaaccaaagatactaaccgcacagactccatttctctagcgtcgaaagtttcactcaccctataagaaaggcacaacaacaccaattacaaacttcataaactaaccactgcaccgaaaaacaactcttgcatctatcaaaaggtaaagtttccgagtatttaccatcttttacagtcaattcgtcctgttccatcatcaagagtgaatctaacttctgtgactttagattcatctttgtcacacactaatccaacaagtgaaacctgaattataccaaaaacatcacacaattgagtaaaagtttgaccatattgacgaataacggtaataaacaaagagatctagaaatggtatttacgtttgttagtgagattccattgatgacgagaccagatttttcaccactggattggaaacattcggtgatttgcttcaccgtcactggaacaagaccttgaaaatcacgattctgcatattcccacaaaacatatacagagcagatttagcaattccaaaatcgattgttacagagaaacgtttagcgattcggaaactttcgatctgtagcctaatcggtggaattgaacgaaatggaagatggattatattaccttagcggtggaggaggaggattcgtaggcttgagaaggttgagaagacatgaatccgccgccggagaagccggaattaggctcgaattggctgctggagaacattttcgaagctacgaaatcggaaaatcgaaagtaactgtgaagagatttaggaagttgaaaagtgatcaaagtaaagggaagagaagattttgggggaattttaatagcgacgaaagaatttttgggggattttccctccaattttgattagagcttcccgccaattagggcgaggtaaatctataatataattactttttaataaattcagttctccggtttactctcagttcagtttattcgactcaaaagctttccggtttagaagacttatgatttcgatgggctcctgtgaagttgggctgttggactttggaaagagttaggctttaaacttgttcctctctcttttgaaacagtagtgcctgtaagagagagcaatagagtgataaataataaagagatatagtggatgatgcaagatattcgtgtcgagatttactcgcggtttgtgaggaactcgtaaatcgacctgtgcatttacctttatacaatttatcaagatagctagagaaagtgaagtcgagagcattcgttatctaaaacaaatgtatagataagtgaaaagtgtactagatttatgatttagcagataaagattgattagctcttgatcttctaccaaatgaaatatagattaatgtagagtgtacaaagcactgggcaagagatacaaactcagccaaaacgtaacattttcaaaagactaaatcagacaaaacagagacccaaatgggcctaagatacttgagtactagtgaaaaacttagatagatttactcaccaaaactctggtcacaaaatcaaacaaagaggagagacctgaaaatcgaggagcaagactaataggtgacattgttgggcagattcctgatgacgttgctcttcattccgagcctgacactgcttttcgctcctcttttgttcatctctctcatcaccttcatcctcactatggcctcctttgactgcactgttgctagacccatcatcttgtacctgtgttttaagacccattcacgtcagattcaaattctacacagagacagtgataaatgatctctgatcggttaaagacaaacctggaggttagagagttgacaatatgcttctgagaagacggtgctggcttctgtttgtagtagcgcatgaattctcgagacccaagagtcctagacgttactttgttatcggttctcttggtgatcacaagctcagacccaccaaaaagctctacagtgttcactgactcaccggacacaaccatctgattttcgtctccattgacatagctgtacaaacacacatcaaaagaagacacaattagttcaagcacatttagacaccaacaacagaggagaaagcagaagaaatggaacctgctgctgtagtcatagaactcttcaagttctgcatcttcttcatcaccaccatcaccataatgcactttgcaatgacctttggcgtccatatgcttacgaacagcttccaaactactaaatggatggcacaattcattgcagtacagacacacgaagtctctcttgacctgaaacaacaaccatgtaagtactaagtagcaaagaaaaacaaagatctaagacagactaagcacaaagcacaaacctttagaccgaggtaggtcagaaaccctttaggatccttcaagtactcaatatcaggaatgaagaacccatgaaacttatgcatatgaaccatacatttctctatagtcttatgcttcttatcacacatcaaacaacaagccggatccaactcaaattcaataccatcttcatccatatcttcttcttcaccatcctcattcatttccgcatccaaatcctcatccgaatcaacctcaatccattcatcttcactctcttcctcctcaatcgaacccttcaattgagcagtgttattcttctcaacacgacgaggcggaagctgcttgatgatcgctttatcctcctctccagtactcgtcgaagccttcaaaacatgactcttcgacttaagatgctgctcatgagccttggaactcctgtaacctttgttacagattccacaactataaagcatcggtgcttcaacagctttaaccttctcttgagctatagcagcttgtctagcttcaaatagtgcctctgttactccaggaacaccagctatctataaacatttcaaaaccaaactaatcatgaactagaagaaccaaaatcaaatccataaaccatagacgaacttaatcgcgaaacgaaaacacaagagattgaattctaaccttgcgcttgagattgtaacggtgccattcggatttgtagtgaaacttctgctcagcgtcgtcttcgaagtctttgttacacgaattacaagctaaacctgacatctttctctatctcagaataaaaactcagagaggaagaattcgaggattagggatggctttggtttatattggaggcgacggctcatacgtaggtcggcgaaatttgtttaacgacaaatctccaaatcttgttgtgtttgcgtaagcagtgatgttaatatgggtcgggttaagatggctttggcccaaacgaaattttaaatcgggttaaaatacattttgtgaagctaatgggctttctaatgggcttttagataaatcgattaggcttattgtaacgaaaaccctaatttttatacacatatacgcaacgctttcttcctcgagggatgagatgagaaagacaatgatgatctccgatcttccggacgatttagaatcggaactctagggtttaaaatcttctggccatagctttaatatcttctgatgtaacagcgacagtttgtcttttccaacaactgatagaaccacgttttcctctttcgtttaagagttttaatcgtgaagatattgcagctctatcagttgttgggaaagaaaaactcttagttttacatcaggattttcatgatttttctttatcttctggttttattgatgttcctttgttcgagcttagtcataagtagttgtttctatttattgatataatgatttttttaatactatacataatgaattccatggtaaagccatttagacattatgattgccaaagtacttgaaagatcctaaagggtttctaaagtacctcggtctacaggtttgtgcattctgcttagtctgtctcatcactttcatttacatggttgttgtttcaggtcaagggagacttcgtgtgtctgaactgcaatgaattgcgtcatccattcagcagtttggaagctgtccgtagactacaatattaaacggttttggtgataataatgtactagctttttaaccaaaaaaataaaaataaaaatattgtatgtattactaataaatacggctaaatcacaacacttctacctttaaaatcccgagggtaagttctgcgaaaatccgaatctagcaaatacaaattgagttttgcaatgccatcatttttatgaagaagccaaaaagggtttggtactaggtgaacaagacctaaggaaagaggatgaaaaaattataaaggaaatgacgtactaaactattcaatacctttgaagaaaactttctatttgtaaaagatgaagaaatgtttgatgaacactctaaaagaaaatagctaagaatcatttgcatctaacttgttgaggagtgatgatgataggaaaaattgtaacaactcaaatccaaaagaaaaagagggtacaaccgtacaacccaagagcttgagacccaagtttctagtatatatgctaaaaacataaaagaagatcagtggaggtaatgggctttttaacaacacataataaggttttcaataaatggtatgggcttattgtaacgaaaaccctaatttctatatacacttaaatatactgtacgctttcttccacaagtgatcagatcagcaacaacgagaaagacaatgatgatctccgatcttccggacgatttggaatctgaaatactctctagggttccaaccaagtctctagcaaaattgcaaacgatggtatgctttattcagagatccaaacttcatcaagaagaactttggtaacgcaccaagtaagttgatgttactgagtaattttggagtttattcagttagtgtcgatcaccatggaattcacaaaaacgttgatccatctatcgagttttctggtaaactttgccgtctaaaggattcagaggatttgaaaatatctaagatcttcccactgtgagggtttaatattatgctctactaagggaaacactagacttgtggtttgggactccagtaccggtgaaacccggtggatcaaaccgagaactcgttttcggaatgatgattactatggtttaggatacgtaaacagcaagtcttctggccatagcttcaaaatcttgaggtcttgctattatagaaacgaccagaaacaatgggttgctgagtttgagatctatgagtttggctctgatacttggagggttcttgattacttcactcatgactatggtgtattttcaagtggcgggcccttgaaaagaaacacttactgggttgctggagataaagaaatgggcatgttcatgttgtattttgatttcacaagggagagatttgggcattttcctcttccgtttaagagttttaatcgtgaagatactgcttctctatcagttgttagggaagaaaaactctcagtgttacatcaaaagattcttgaattttcaaatgagatgaagatatggttgaccaataagattgatgaaaccatagaattgtcgtggagcaacttcgtcttaacagtggattatgataagtttaatttaccgagcgtggtgaatgtggcaagtttcttgttggatgaggagaataaagtggcagtgtgttctgatattgacgtggatgatgaaaataggaccagagtctacgttgttggagaggatatatataaacaagtctataaagacactacaaaggcatcttatttcaattgttcaacaagttgttctatttattggtgatatactgatttttactcaaaaacatttttctgattatagccactttcacatctcagattcttggattttgtaggaagattaatggattagaaaaaacaaagagttaaaacattttgttgatctttgagcagtcgctcacgtcaccaattcttatgaaaatttaaatagtttgcaataagtaagatactttaaatttatttactcttgcaaataaaaccaagcacacatttacacaaggttcaagattttgttgttgttggttatctagtattttaacattttggtgtatttattaacctttatatactacaaatttgtaacaatgtattttttccccttctaagagaaggtattgcgggtttaggttgtgccatgacagcatagcaactaatctagacaatcctccaaaagctgccacgaaatcatggcggtaggtttatggtttccaaatgataggtttctaaactaatttatatttcttaagattcactaggtatatgttttctaaactttatatattttcaaaactacacgataactatatcagtccaatatagtaatatacaactcaccttttaatcaaatactaaaacacaattcctaagaaaaactcaacccatacacatgccaatgtttacatattactcttttttctttcataaatccatattatcacgaccaatattcagatgcctgttgattcttaatataatatcaacaaatatacagttaacattcttaaaacgtcccaaacggctcctcctctagtatacacgaatctggctgattctttatggctgttttgtcttcgttgacgtaaaaggagcttgtgaaaatagacaatctcgacatactattctcctattcccttccattactaatacatccataaatacacaatattactaataaatccacaaatatccacaatatttgaaatcgtcgaattttaaaatctccattcaccataaaaagaaagagaaaaatcatttaaacaacaaataaataaatatactattaccaaatcacacacacacccacacatccccttattattaaaaaggaagtacaaattgaaattttgtctaatttggtctcaattttgatttcaattttggattttcttctttgctgttcaaaatcattaagggtaatttggtcttaacaatcttctaaactttatatgatctgattgaatctaaaccgttcaataaaattaattcccttcaatctaaaccgttcaacaaaaataagtgaaataattttatttttttatcttcactttaaaaacatataattataaataacatatggtctttattttgccaaaaaagtgtataacctgtcaaatagttaaaaaaacacttataatcataaaaaaatattataccaattttgtgaatcttacatttttgtaaatattttactttcactaaaattacatacacatttttaaacacattttaacacatttctcttatcactaaataacaaccaaaaaaatcccaattattatttagttatgtttgattaaaaagtttatatttataaatttaagatatcaaattcatttaaatatttagtataagaaccaaataaaccgattgcccgcggtaaaccgcgggttaaatcctagtatgtatatatatatatatatatacatatttatttatctacattaaatgtaaattaatgttaattctcaaattatttacccctccatactagggactagcatattttatatggttttttctcaaatgccactctaagtgacaagtagatggttgttacttctattgtgatatgtctcaccttcaaaagcgcagtcgtttcaaattgaataatgaagtataagacatctcaagaatctctactttgcgttccaaatcaacaatataccgtaaattactctattttgaatgtgtagttgagtctcagtatgccaaaattttgaatgagcatccatatgaataaatatataaaaccatacattacataataataataaaagttaaggaagaaaaaacattggtaattttagtcacatattgcttacctttggactctattaggatcagtatgatgcaagactcgatggtaggccttgtattaaatagagatggtggcttcacaaattggcattcgctctattttgtgaatgattgatggtcgatgatgtagaactgacacgatggcggccgctgctcttgtgtgggatcaaatggaagggatgtgttggtggagtgaagtgcactacaaatatgtgattgatctctgatacagtactcaaccttggtgaataacacacacaagacaaagaacaagcttactctctcaataacacttaaagagaataagtaagaaaatgcggcttctttgttaagggtgaaaattcgtacaattgttgaagagggactttataagagtccttcagctagccctaaggccaaaaaataaatgcataaacacaataaggaaacaaataaaagcaaaacacaaaaacgattatttttagaaagaaaagaaactaaataaggaaactacttaaactttcttgaggagcacgtttgataacgattctagccgtttgtgggatgtttggacctgcaaagtaaaattgaataaaccttacatggatgtgatttaggcctagtagatgtcttttgagtcacttcttgtagatttcgttgagatacttctgaaatcacgtcttgtgctcgtttgctggtcggttccttgaagtaaaggtatttctagagtccctcttgagtagcttgatcaatgtcttcgagctcttccacgtccttgatgtcttggtcttgatcttgaatctcattatcactcttggatgtggagcttatattgcacgtctcttgcagctccaaagtcttctctttttttttttttcattcataattttccattagaaatccaaagtcttctcttggcttctagaggcttctaaacctgtcaaatgagatttcatacttaggggagtagttcgttcaagacttatttgggagaatgcttcagcaagctcttcctcggctataggaaacgtgactcggtagattccaaagctttatccagtcaatgaaactagtatccactgaagcactcttataaagtctgcataaaggtctaatgtctttacctgcttttctttttaaacctgaagtagtcgatctagtcataagcccgctctcattcacattgcatgcaccttctgaattggtaaagtttaccataatattactaacattccaccatcgtgagaagcattattgtaataaagattcattaactaagagtagaaccccttcatgacttcgacatcatatgtcaactctctaaggccgtcctagatacgcttgattcccctaccatcacacttaatagcttaggttagtttgatccaagaaaactatgatgggtcatcaaattaatcccaaggctattagcgtcattccgtttatgagactatctcgacggcggagtgttgcagatagagttagaccaaaatcagatgatgcaatggagaacatttttgattaaacccaaagaatgtgtatgtgtcctctacatgtgttgatggaatagtgtacgtcggcaggatagaattgcgacagactgacaccgaagatgagctcctcgatggaataaaagagaagatatgcagtagttgagtaattgaatgtggtctgtagttggagtgcgggaatgaatcatgatggatgagtaaagcttaccggcgccaatgaattatggaacgaagacgatgaattagtagagcttaccttcatcatcgtcgttccataactcaatggctctgttgatctttactcatctttcgtgattcatttctgcactccaaatacaaaccatgatcaatgactcaaccatccatgtctattactctatttttccggtgagctcatctccatcgttagtccgtcataattctatcccattgaagtacacttctccatcagcacatgtggagaacatagactcttcctatgggttttaacaaaatccgctctccattgcctcattgggttctggtcactaggtctaactccatctataacactatactgccgagaaagtctaataaacggaccaacactgatatcatcaggatcaatgcgatgtcccctcagagttctccgaatcaagttaccctgagtcattaggcatgttggttggggactccagttgtggctatgaatgccttggagagttgatatatgatgataaagccatgaagggattctactctaagttcatgaatctccataatattaatacttcgaatgatgaggagaatgttaataatttgttaataacatttaccaattcgagacgtgcaagcaatgcgaatgagagcgagtttaaaattggatcgactacttcaggtgtaaaacaaaaggcagaaaatgacattaaacctttatgcaagctttataagagtgctttagtggatactactttcattgactggataaagcgctgaaatcttttgggttaagttttttctagcaattttgttgggaaaagaaagtattatactgatcttaagagggttaaatgtaagcaatacatgactacacttaccaatgtttaattattatacaattatgtaatgtatagttttgcgacatttattcatatggatgctcattcagaatcttggcaaaccaagactcagctgcacgttaaagcaaagaaagccgcaatacgttgttgaattggagagcatagtagatatttttgcgatggctaatacattagcaagtagtaagtttggaacatatcacaatgtagcaagtttggaaccgaaaagtagatggttagtgtttagaatgactgtgctgtttgaggttaaacatatcatattagcaagtagtaaccatctacttttcgattcgaatgacactttggagggaaccatataaaatgtgatggtctttggcttgaaaaattaagcgtggtcgttatgttggtatgtgatttttttatgcagtaagaagattttgaaattcagtgatttggagcgatgtaaaatggtctaaaatggtttgaacgattttatgattgattttaacgtttgaggatagtagcggtagaatcaatcaagcgtgttgtatatggaaatggttggtgatattcttagtaactaatgtttttgatttgtggattataacaatctctatagatctattgacatcgctctccatctttttataaatattttgtactattaaaatcaagcaattctatctagctaaatccaactctcattttcataaagaaacaaaaaaaatgatatgaatatagaattcttaaattttaagaataaattcttgcatatatttatgaatttctaaaactccctcatattaaaggaaactcttcaaagttttaacaaatctcttcactcttaagagatagagttttaaagattgttagatttcttagtatctaatgttattgatttattgtttctcacaatcttcataaatctactgtagtctctctccattctttataaatctctatactcaaaaaatcaagcaactctaactaaacctaactcctacttaacacccccttccctaaatttgattgtaattgtagaaaagtgaaagtttacatgtaattaaaatactaggaatgtttccaatctctaagaattcttaagtgggaagctgactaaaccacaatgagaggggcattgttgtgagagtaggacattgttgatgtacgtcgtcttgagttatgatggtgaaaaaaatagctagagaaagtaaaatttactttagctaggtttttttgtttgattttgatcattgggcatatgtaagatgagttttaattattgggtaaggctaactcattaaattggtgatgacgatgtttcttcattttagacattcaaggaatgatgtaaaagtgttgccaatctctgtgaagctgattaaaccatcataagaagcatctggatttttggaatccaaaagattttgaaaatcgagtgtagtatttttgcgcggggaggacattgttgacgtcatagtcataatggcagtgaaaagtagtcagaattgtgtataagtgaaagtaaaaacctatttggttatgttctttggttggactttgatgattggacaagtgagattagtttttataattaggcatagattggtaaaagtgtggaactgaatacgtatgactataattatccgtaaaatttatagtcatagaaggggtaggtggatggaaatttaaagattagattctattcttatatattggtttatagattctcatattctctataaatccattgttgtgggtatgattgtttttaaattctattcaaaatgtactgtatattattagaagtttggtttccattgatactatataatttaatgtcaatctagtgttactagtatatgaattactaacaatttaacttataaacacacaaattttaatatattatggatatatttacaataattcttttagagatttatgaattcctaaaactccctgaaaacttaacaaaacttttgcaaaatttagcaaatctatcgacttcttaaatcaatcatcgactctatctaattccaattcccattaacaccccttctaaatatgaatatggatacaattgtagaattacctgtcataaatgtggtagaagcattaccaaccttcaaaaagtgtaaaggtggaagatatgattaaaccatcatgacaagcgtctggatttttggatctagaagttcttgaagacggatgtggtgatactccctgcaaatttaacaacaattttgaaatttttacaaatctatcgactttttaaatcaatcaactcaatctaaatccaattcccattaacatcccttctaaatatgattgtggatatcattgtagaattacatgtcataaatgtagtagaagcattaccaaccttcgaaaagtgtaaaggtggaagatatgattaaaccatcataacaagcgtctggatttttggatctaggagttcttgaagacggatgtggtgatactccctgcaaatttaacaatacttttgaaatttttacaaatctatcgacttattaaatcaataaactcaatctaaatccaattcccattaacatttcttctaaatatgattatggatatcattatagaattacctgtcataaatgtggtagaagcattaccaaccttcgaaaagcgtacaggtggaagatatgattaaaccatcatgacaagcgtctggatttttagatctaggagttcttgaagacggatgtggtgatactccctgcaaatttaacaatacttttgaaatttttacaaatctatcgacttattaaatcaataaacttaatctaaatccaattcccattaacatctcttctaaatatgattatggatatcattatagaattacctgtcataaatgtggtagaagcattaccaaccttcgaaaagcgtacaggtggaagatatgattaaaccatcatgacaagcgtctggatttttagatctaggagttcttgaagacggatgtggtgatactccctacaaatttaacaagacttttgaaatttttacaaatctatcgacttattaaatcaatcaactcaatctaaatccaattcccattaagacctctaaatatgattgtagataccattgtagaattacctgtcataaatgtggtagaagcattaccgaacctttgaaaatgtaaaggtggaagatatgactaaaccatcatgacaagcgtctggatttttggaatctaggattttttgaacatatagtgtggtgattttttggggagaagagatcattgttgatgtatgttgcctgagttatggccgcgacgaaaaaatagactgaaatgtgtgaaaagatggtataaatatctttacctaggtttctaggttttgattactgggcatgtgaaatgggttttaataaatgggcttgggcttgtaaaattgtggaattaagctattgtaatcacgcatatgagttatctaattggataacttattagattgtaataatgagggaaaaaaaaagattattataatgagaggtccacatttaaaatgatgtgacactcttagcaaataaatataacatggcaaaatttagaagtgttgtcaaaaaacgataagcgtaaaatggaaattgtgactgaaccaccataagaagcgtctggatttttggagtccgagagatttagaaagtggagtgtggttgttttttttagagggggaatgttgttgtttatgccattagagtcatggtggcgtcgaagaacaataagtatatgtgggaatcagagatgtgtgtaagagaaacaaaaatttatttggttgggttttgaattttcaagaaaatgttaaattatttcatcgagtttctttttttttctctatgttaggaaatggtatggtcaaaatctattgatgatggtgatgcctaacattaacaaaaccaatagaagggagacaagagacataagacatcttcttgaaattcatcaacattacaaacttactaaaactcctcctcccaatcccaaatgaatatgtacttcttaaagccacgtgtctttctctttttcattaatatttatttatttttttaaaatgtgaaattatttctttggtttaatatctctggatcattcttctacaatgatcacaagtatttagatcatgtgtaaatagtcccatcatgaagttttaattaccaatcggtattgcacatcaccgattggtactgatccacctgcacttttgtcgatcttttgggacaacgaaaaagaaactaatttaatatattttgttatccgctcgaagatattaattataagctttaatttggaacttctttatatcaattatatatatatataacttctttgttaatagaaaatgggaacgatccaaaacttaagacatttgatctccacaaggccgtcgacgtacagagaagaagaatggccaaaaataagtaaataaaagagaagaaaccgaggggaagatgattttgcattgccacgacccacgagcatccatcggccatcgcctttttggattcacatggcaaagacaaacttcgatcttccttttttctcgtgaagttattatctctctaatttctagtctggtcgaacctatatttcatcatatatatcattatttaattcatatgctgatgcatgggacattatcatgttaagtcattacaaaaaaataaaaataaaaataacttacgttggactctcagtttaccttctcctatggatttcacttccttgtataagaatatacatcttactcaaatcatgatttatatgcaattttcttttgtgagattttttttacatataaaccagaaatgttgaaagaagaatatccaaacacaacaaaataatagaagaaatctcacgtagaacatggaaatggaaaaagaagtgaactcgtgaaccgatatatttaccaaaagtgcacacatagacaagtctttctcattaaagcccaatttcacactttcacattttcgtgacgtcttttgaagttttgaatacgaattaatgttcatgtacgctataaagacctaaaaggttgtcatatttctccactttcatcttctcttcacaactatcctaaaccttttttccttttcttcttcttcactctctttcttcccggcgtcactatggcggctgccgccggtaaaggcagcgaactcgaccacatcaagaatgaatccgttgatctggtatatatatttacgtcttcttagttttctattatctatatgttttaaaaaatctttggccctactaattttaaattttctgttacataaaagatacatatatgtatagtacgtaactagtaactactttgatctaatcagttaatatatttgtcccatgcgatttactcatgtttccattagaaatgattagtcaaaattatataaatgatgggtctaggtacgaatacccatggaggaagtgttcgaggagctgaaatgtacaaaacaaggtcttacggcaaatgaagctt

SEQ ID NO: 276 - DNA, 93701 bp, Arabidopsis thaliana
gaattcaaaaagaaatgcaagtttgaccatttgactcaaagtgcctgcttaaggttcaaaggcccaaattttttttatacatgttaaggctttttttttaatacctattagagatttttgatataatagcattgggtctaggcaatgtttgggtcggacctgactcaaaccaaacaatatcatactgatatgaaagttggtttgggcttggaaaacctaacatttcttttattttcttacaaacaaaattgtacaaaggacccaaaaaaaagacaatgccatatctaggcctaatactccgagcgagtgaccgagcgagagtcatatagttgtatcgaaacgacgaaaaataaaaaccgtacatagatttttttcctttttattcaatgtatcttaaactaccaaataactcaaaataacttcaatcactcaaaataagattgaatgcaacatctttaattttggtatatagactcattgtgtagtctttctcattgagcttacgattgaacgtcaaatgttaatgttttagttgtacaattaatgtctattgtcgtaaaattaatgtttaattgtcttagctttataattttgttgaatggacataattaaaaccaaaatcaaaccacatgttctataatgaatacaacgcatgacatgacaaacttaggatgctatagtcccacatacacacaacatgaccgcatacggctattggccagtcatgagtctctaaagttgtttattaatcactcatgttaagcactattaaaagaaaactttaaacccaattcagtgtcattcttcttaggctttacacttcttgttttaaaggggagagttatagactcatatcttccaaacctgtaatccgacctgcacatatatagatagctcaaattacatatttgatattagttctggtattcataaatgcataaaacatagatataaatataaaaaatgttgacaaatacacaagaataggagtagcagagaagacacaattttgaaacgaaaaattcatatgaataccgaagattatcaacaagcacaacacaaatatcaacatggcagattggacaagttttgagtttctttgttattaacttgtatcaacaagcacaacacaaagatcaacattgcagattggacaagttttgagtttctttgttattaacttgttatgtatgcagttgctgcatattgttttcagaaatatttcaatcaatatatattttcagctataaaatcaatgatagtcctaaaaatcatgaaggtacaagatatgacaacgtttttcttaagccaaattaaatgtccaaagaaacattaagattgatagattccttaacaaaaagttcagaatttttcaaaactcaacaattctaatacaacaaaacgaatgattgtattaggcttgaaaaagcttttaagtgttgaaaagttttgaactcttagggaagaaacatgttaaaactcttaatgtttagacatttagcttaagcaaaacattgccatatattgtgccttcatgaatttaagactatttctaattctataattgaaatttataacaggattgcttgttatattacagtatctattggagagagatattatttatatgtgactgaagaatcacatccatacaaaatgtattatgtcttcttcctgcaaaaacaaaccatgtgactgagaattcctctgcagcttgtctttctgctaacacatcaagcagccacgtgagtcgtgaggttatctgcttctacagcaatctgtttggtatcagtctcaggtttctctccctcagaagcttgtttaaacagagacagaaccgaatccaagcaggtttggcaagaggaatagattgtatcattgaagttatcagctacattggctccattctgttccctaagaagcttcaggacaatagatttcatctcacgtcgacttttctcctctttgcttcttaaaacaagctcaatgatgcgtgatagcgtctcctttggtggatccacagcattagacgcaactcgtttaagaacaggcgtgacaccaactccttaaatcaatttaagttttattaaattttagatgatgtgttataattttttttaactcttacttaaaatcatgcgatttgaatctttttatttttcacttagtaaataatctaaaatctctttatcatgaaaattcaattgttattgtaaagtgttccaactcaaatcactaaattgttcaaacaattcagtactacattcataaaaatgtaatctcatgtcactataatgtgatttataactatttatggatgtctacttaactgttgaaaaacttcataaataaaggtaatatagttatagtgtcactaactaatgctatttttttttttttttttgaaatttgtagaatatatactaaaattgtccacaaacttatttattttttgtcgggtccacaaacttatttaatattaattttctaaattacaacaaaactaatgaataaaaaataccaaagaaacagaaaaaattgcaagctccactaagaattgaccgtctcaaacaaaactcgagggattttttttttatatggcgaattcactcattctgggctcaccgattaatccagaaggagaaatgatgatccaattctcaaataatcatgacaacaacatcggtaagattcaattttatttatccttcgaactttgacagcaatttgttgattcgattttaatctgtaaagtgaaggaacaactgcaaatttttaagcaattttagggattttcaacattggtatatatatatgaatgagtccaagagtacttgctttggtaacattgttttaagaacagctacatattgatattaaagcatctaaggtttaacaatttgggtgtgttttgatacagagtttcaaagaaggaagaaaatgaagaagaacaatcctgaaacagaaactgattcttcatcagatctctcttgttttgttgcccaaacaggtgcactggtgaggaaatggaagatgtatacacgtatgacacttttgttgattagtattggctgatttaatctgactcttcttttactttggtgttagcttcatcttccacaaggtttcactagctcaaatggtagtaatagggaatgtagaaagagtcctagaccgattatatcatcatattcgtcaagcgagaaacagtttgtaacgtttacacttgcacctgttgatggcagacattgtagactggtgggatcatcatagcacttgcacttgttagtttcctttattctacttttgttggttttgactcttgttcaattctctgcagcgtcttccgatgcaattcacgagggagaatgggattaacaagcctgggaagatatatttggtgggtaaagatggttctaagtggcttgcaaatcttcttttggaaaacaacagaggaagaatgactttaggagatggttggaaaagttttgttaaagcaaacggtttaaagactggtgatacctatacgttcaagttactgtgggaagacacaactcctgtgctcagtttgtgttttgaagagtacaacactgacacaagagtaggagaagagtcttcgaaagagtctcttcccgcagagcctagtagccaagaaaagatcgttaaagatgacaacaacaaagatgaaagcagcacatggaagagagagggtaatcatctgagatgcaaagattcaacttcaccaagccagaactgcaccttgacagtaacaatcacgcctgatagtctcgaacatggtagactagtaagttcaacaatcaagtcttgttcaatttcgtcccattgaaaaggtgctttttgaaaacaaattctctgttcatatacattttatagcggcttccgttgcaattcatgacggagaatagcatgaacaagcccggggagataactcttttaggtacagatggtgcaaagtggatggcaagtcttctactagaaaaaaagggaagaatgagtttgggaaagggttggaaagattttgctaaagcaaatggcttaaagacgggtgattccattacattggagccaatatgggaagacaggactcctgtgctcagtataaagtctagcagtggtaaagggcaaagtgagttttccaaggaatctctttccataaaacctagtagtggaaacatgactaagaaagtagagaacaacagagaagcaagcagaaagtatcctcctagaagtagagaatcatcttcagcaatccaaaaccaattcatggcattaacacctctacgtgatatagttagccaggttgctcatgatcttagcatcggtgaggtcatcaatttcagacataaaggagataatatgttgcgggtctcagatttgggatccaattgttgtggggttcaagatttactggctccaagcagtaactatgatcatgacaacatcagtaagtttgatgatttaaagctgtaacgttgacaagattgttaaatgcagtctgaggatattctcttatacaggtaacatttcgatgaaaataaatccgcatataagaaaagaagctgtaacattttcgtcatatgatggttatgctcatgacaactttggtatattcagttttattatagtacatatatggatgagtccaagatttcttacttcggtgaaagcatctgaggttttaacatgtggggtgtttctgatacagagcctccaagtaagaagaaagtgaagaagaacaatccagaaatggaagcagattatttatcagaccactcttgttttgtatcccatgtcacaacttcaagtctacacacaaatgcgttggtgtgttttaaaattcaaattatttactcctgcattaactgatatctcatgctcatggttttgcatacacactagctaattgacaattgtttcttggggtagacatttcgtttttgataatcatttaggtttttgtttggcttgatttagtttattactctttcatattgattcatgaacctaaccaaaaatttctttcacgttggctatattatcatcccgtagagcctagaagtgaaagagtctcttcccatagagcctagcattaaaccaaatatcagtgaagatgacaacaacaaagaggaagacatcatagaggagaacagctcatttgaaagagagaagaatcattggatatgtatagattcaatttcatcgagccaaaaccgatttctgacattaacaatcacacctgacagtctcaaacatggtagactggtaagttgatctatcaactattgttcttttaatcgcatatcgaagggtttcatatcttattctctgttcatatcttttctagcgtcttccactgcaattcatgatagagaatagcatgaataagcccggagagataactgtgttaggtaaagatggtgcgaagtggctggtaagtcttctactggaaagaagaggaagaatgagtttgggtaagggctggaaagattttgctaaagcaaacggcttaaagacgggcgactccatcacgttggagtcagtctgggaaggcgcatctcctgtgctcaaattgctccgtatagagtctagcagttttagagggcaaagtgagttttcaaaagagtctcatttcacagatgctagcagtggacaagagaccagggaagcagagaaaaacagagaagagagtagtagcttatgggagttggagaaaagaacctattgtccaagaaaacgagattcatcgtcagatgtcaaaaaccgattccttacactaacacttgcacctgaagatgtcaaggatggtaatttggtaagcttatcaaacaactcttgctttagaggttctgttttgaatttcatttgataatgagatgtgtttgttcaaatatcgcagcatcttccttgtcaattcatgagaattaatggcatcaacaagcctggacagataactttgttgggtagaggcggtatgaagtggtttgcatatttactgtcaggagatggaactgtcgttgtgggaaatggttggaaaggtttttgtgaggcgaatggtgtgatgttaggagagacttttgttttggaattcattcccaaagatgatacaaatcatgtatttaagttctacaccaagtagggagaccaaatacgtaaatgttagttagtactttttcaagatttctcaaatgttttctccggatatcacatgacaggttctgcatatatcatggattgatggactgcggagagttagctaaaacaattaatggctaaacgactgatgaatcatttacgttgaagtccactaatgatatcaggtagaaaagagagagttcaaaagataccgagaaacagtcttttttttgtccacaaagcctagcagtgaaaacaagaacaagtgaggtgcagagagattcatgaccctaacacacttgatgatgctagagattatcatctgtttcacagatggtttggtttatgtcttgattataattggtggtgacgatgagggtcctgaattcccatttggatcgagctggggtcactcactgttttgggtttatcagtaggaaaatcctcaacgttgtggatcacctttggacgatgatactacggtaatgcatatattgatatgtttattccattaaccgctagagaagtggaagagtttacgatctcacatatcataaagctcataaaagaagagggaggtttggggttaacatcgatatctgaggcgaataaggtgagttttccacatcaataaaatacagagagccagcggcttcactgaataaagtagaagcctatagtggagcatccacatcatttctggtttgatagatggtcactgctgggtaaactacttgacatcacgggatcacggggcagcagagacttagggatacacatccattcaacagtggaaagtgtgttggcaacatataacgctgaaaccatagagtggattatctgaatgatatggaagaggggatcgattcacaacgtcaaagaggttcattgatcgaggaggatgtggtttgtttgagagattaaggagtcaaattcaagcctaaagtcagttcgaaagctagatagcaattaactctgagacagccaatagaggaatagtataaaggtttatggttcacccacacaacaaacaattactcattcatggcaccaaattagttgtttgagcactggtgcttctgtggcttgttccttttgtctggaaaaccagtggaaacacggaatctttcaaattttaatccatttgaattgggatgatttaactaatgaaaaaaaaacacttaaccgaggccaaaccgaataaaccgacaccccaagagcaaatggcttggaacctggcgataataactttggttggcaaagatggtacaaagttggaggcaactcttcgacgggaaaacagaggattgatgtgtctcggaaatggctggaaagatttatctatatccaacggcttgaagagtggcaagtcgttcacgctggagctaattttggagaatggaactcctatgctcagtttggtgagtacacagtccacaagtcataaaagccagaaaagagagtgctcaaaacatagcgagaaagagtcgatctctgcagtacctagcaaaggaaaaaagaacaggaaagccaggagcaacagagaggagaggagagactcgtcttcagcaatccaaaatcgatttgtgacattcacaccagaagatatcagagactgtatactagtaagttcatcaaacgactctttcttcaaaggtagcttagtttctgtcttgattctaattagtaactagatatgtttactaaaatcttttacagattcttccaagccaattcatcaaagctaatggcatcaacaacctcggggagataactttgttgggtcaaaacagaatgaagtggtttgcatatctactgtcaatgtcaaaagatggaagtttggctctgggatctggttggaagggcatctgtgaggctaatggcgttaatacaggggaggcattcacgttggaatacattgatgaacaagaaacagctcatgtgcttaaattctgttccaagtccgtagagtaaagaccataaaagtttaattaaaagcctacttgtttgtgaagttaaatacagtatgtatcttctaatggctatatgattttgaacttgtgattttgttattctgtaacctcagggacgtgcacaagtttgtttctatggtgtattcccaggcaaatctgtcagaagttttgcttctctccggtctaagtggaatgatctattttatgacttcctcagggaacaaaatctgagagtgaatccagtatccactctctgccacttgtatccaacaaatccttcacatacttaagggaagtaatgaacttgtattgtgcttgttgatttagatcattggtgttgccatatgtctgtgtaagcatcattactgtaattacaactcttgttccttgtttaaacctaggcctaaacttagtcaaaaaaatcttaattcctaaaataaaaaaaaagagaaggaaaaaaagaactaaaccgaggccaaaccaactcaaattctttatccggttcaacttcacatatacatttaatttggtcgatcaaaattccccaataaacaatttacaaaaggcacaaacgaaatgatcaatcaaattgaactgtccattactaaggatacgcgccgagttttcgaattttcctaaaattgctaacactaaaactcaatgcctgagaagaataacaaaaagttgtgtttatttttctgccctggaaagaaaaggaagagactttttcacctgagacagcgatttctagggttttgttttttgggttaccgatttcttctcgaagcttctagaagacctcccagtgtgttggagaagatgacgctctgtggaaagtgggattagagatggtgctaaattcgtcagatttaggacctagccgctgtgatattcgagatttaccagctccgagcagcaccaatgatcagggcaagaccggtgagtttggttctgtttttgtcgatgaccaaactgcaaaaatgaagtttttatgtgagaggaaactctgattggaaagcaatttatctgattcggaaatgagaagaagaaaagatttgtctgttgttgtattgtccaaggttaattggtttaagaacactttcaattaaaagtatcagagaagtttggtttttattgatacagaacttgcatgaacgaagatagtgttttatcttgtgtgtatctatatagtctatacaaatacctctcttagtactacagatctcttctatttttgatctagtgtccaacattacttggttttgtgagtttgtaatctgacatgtttgtttttttactgatacagaacttgcgaggaagaagaaagtgaagaggagcaatacagaaatagaagctgatgcttcttcctccgacaactcttgttttgtggcccttgtcacggcttcgaatctacgcaaagatgctctggtgcttatactctttattgcatactgtggtttaatcactcactataccaatatatatgctagcaattgtggttctaatcactaactcaatgaaatgctgtttctaaagttgcgtacttggtttagatcctattgtggttcagtttgggagagaacttgttgaaataaaatcaaaaggttaactacaatatggttttggttcactttgatcaaacatctacttaggtaactgtatgtattttctcaaatttatactctaactttagtttggttttcatttcgattctgtttggtggtttggttttccttatttcatgtatccttttgttgtggtttacattggtgtggtgagactagagaaagtgttttctcacgtttgctatacttatgtttagttttgtgttgaaaatgcctgaatccttttgttgcagtatcttccacaagatttaacaagttcagttggtcttgaaaggaaataccgtgagattgttgtaacagatgaaagggaaagaagatcatgggcgttggatctgaggttcaacaaatcatctgatactttctacataagccgaggttggaggagtttctgtgatgaaaacggtaaaaagccaggaggtgtctttgttttcaaactagttggaaacagggaaactccggtgcttagtttctgttccactgaatctatcaacgatggaacacaaggacataagaacaacaaatacaattgtatggagctgaagagcaagaagaagcgtatgagatgtagagattcaacttcaccaagccaaaaccggtttatgacattaacacttactcatgacaacctcataaaaagtagacgggtgagttcaaacaactcttgttctgagggttagttagttttatcgcttgcactctaatttgttatattctcctttaaaatattttccagcaacttcctttgccatttatgagagaaaatggcttggtcaaacctgggattataaatttgttgggtaaagatggtacaaagtgggaggtaaatcttcgacgggaagccaacggaaccatgtatttgggaaaaggctggaaagatttcactatagctaacggcttaaagaccggcgaatctttcacgttggaggcagttttggagaatggaactcgtatgctcagtttggtcagtacacagtccacaagtgatagaaaccagcaaggagagtgtttaaaagatagcgagaaagagtcaaattctacagaacctagcagtggaaaaaggaaagccatgataaacagaggcgtgagaagaaagtcatttccagcaagccaaaaccggtgtgtgacattaaaacttactcatgacaacctcatcaaaagtagacgggtgagttcatcaatcaacccttgttttagagggtacgttagttttatctcttgcactcatattaggtatgttatccgttcatttatgctccagtatcttccgttgtcattcacaagagataatggcttggacaaacctgggatgatttttctgttgggcaaaactggtagaaagtgggaggcaaatcttctaagggaagcctcaggaagaattgttttgacgggaaagggctggaaagagttcgccatggcaaacggcttaaaaagcggtgaattgttcacgttggaggcaattttggagaagggaactcctatgctcagtttggtcaatacacagtccacaaattatagaagccaacaaggagaatgttcaagagatagcgagaaggagtcgtcgatttgtgctgaacctagtagaggaaacaagaagtggaaagctactaacaacagaaaggagaggagagactcgtcgtcagcaatccaaaatcgatatgtgacattaacactcacaccagaagatgtcagagcctgtacactagtaagttccatcaaactactcttgtttcaaaaaggggtcagtttctgtcttgattttaatttgttacgaagtgtgtttattcaaatcttttgcagattcttccgagtcaattcatgaaagctaatggcatcaacaagcttgggaagaaaactttgttgggtcaaaacagaaagaagtggtttgcatatctactgtcaaaaagtggatttgtggcactgggatctggttggaaaggtttctgtgaagctaatggcgttaagacaggagaatcattcaatttggaatatattgatgaacaagacacaactcctgtgtttaagttctgttccaactccgtagagtatgtaaagttcacaagccttccttaaaaactaaaggcctttttgttagttaagtttaaattattatgattatgaacttgctattttgaatgaaccatctttaaagagtttctcttagaatataatgacaacttattgtggattgaaataaggttaacagagttgattgaaatctaaataagctaatgcaatagattcttgactaaaaatcctaaacgaaaacaccacacattaaaaaaaaaaaaaagggtcctagaaactagcttagaaaagaaaaaaaaaacaaggttacttgtcatcaatagttttgtcatagaacactaacgtcgagcttatcattccagaatcagttggcatagagaggaacgagagcgaaatagagtgtatcatcggcgtggaaagaccataggcgaatatttgtgttttcctctagaaggcaatctgtaaccacttgattccaccctgcaaccaaattgtatagaagaatgcccctcatgtccctcaacctcaaattcaccggaaattcccttagatgagaatccacgagtatcgcgtctactccttctttgcgaaccctattggcatcttcttctatggcccttttttcctcgtggttcaagaattccaactccacgatctggctgacaggtattgagagacgactttggtgtggatcgacatcggtttggaataattctttatctatgatcttcttcgaattgtcttcaacgtctccaccgttcttgcttctcatcaagctgataagccaccctggcgtcggctctcttgtcttggaagaagaagcatccgtactgcgttttgccttcttagattttcgttgttccatgggaggagacataggagggagatcatgtctgtttctactgcgtcttgttggagattctcttaatgagtggtcgtgaatatgggatttagactccatgacggtagaaggagtagtaatcgtcgagcttttgtttcttcgaagtatacataactgaagtttgttatactcctcccgcgttggctttgagttactcatcatcagtaatgtttccacacactcgacatcttctttagacacctcttttttgaagatcattgtttatgaactctctcttctgtttttttctctctattgtatatatatagtgagagatttactcctcgtaatagagagatttactccacgtgatagagaaagcattattactaacaatttttcttttttctttttggaatctgtttttgagaattatcttccaatttttatatatatattttttgttattcttatggctagatagttataactaaagtcaaacataaccacaaaaattcaaactaaatcgaaccaaaattttaaaatacacgagtatatccttaaattttttacgaaactatattataccgaatgaatatctgaaatatccaaaaatcgaatggatatccaaatccgaaacactctaaataataacaaatgaatccaaaattataataattaacccaccaatattagttatgtttatactcgaaataatcaaaatacttaaaaaaaaccaacatatctaaatgttgttggttatatttgtcaaaaataaaacatattttgcaaaataaaaccaaattcattaaaattgttttggtatttcggatagtttggataaaaaatgtccgatttaactccatcaagccaaaaacgcggaagtgtgttacgtacaaagtttagcagtttaaactctaacaaggaagagtccatttcctcagaacaccgattggtgacattaacactcacacatgaaaatctcaaagcctgtaaactggtaacttcatcaaactattcttgtttccgatttgagttagagtccgtcttaaactatatttgtattcttgtttgttgaaatcttttgcatattcttccaagtcaattcatgaaggctaatggcatcaacaacaaacttgggaagataactcttttgggtgaaaacagaatggaattattgtgataaggtcgtatattctcttgatatgtttaaatccctatagtttaggagattgagtttatcacatacaatgactcgcttgtataaatacacatgttttgtgcatcaatgaaatcaagttagttcaatacctaatccctaatttgacgtgtaccttgatctccgtctctaaaattgtgaaacaaacaaagtgcgtggctacctttactgacacactttgtgttttacaggaccgtttttcgaggactttgattggaagcggtgaagagcgtgatggggtttattatctgacagatgtggctacagcaaagattcatacagcaaaagtatcgtctgatcaagctttatggcatcaacgtttaggacatcctagtttttcagtgctttcgtctttaccagttttgactagttcttctctttcagttggttcgcgttcttgtgacgtgtgttttagagctaaacaaacaagggaagtttttcccgttagtactaataaatcaatcgagtgtttctctttgattcattgtgatgtttggggaccatatcgtgtcccgtcatcttgtggtgcagtctatttcttgacaatagtagatgatttttctcgagccgtttggacgtatctacttcttgcaaaatctgaagttcgcactgtactcactaatttcttggtatatactgaaaaacagtttggtaagtctgtcaaagtattacgtagtgacaatgggacagagtttatgtgtcttgcctcttactttcgggaacatgggattgttcaccaaacttcgtgtgtcgggactccgcaacaaaatggtcgtgtagagcgtaaacaccggcatatccttaatgtcgcaagggcaatattgtttcaagcaagccttccaatacaattttggggagaagcggttctaacggcggcatacttaatcaatcgcactcctacatcacttcataatggactctctccttacgaaattcttcataactccaagccaaattatgagcatttgcgagtctttggttctgcgtgttatgttcatcgtgcttcccgtgataaagataaatttggggagagaagccgtttgtgtgtttttataggttatcctttcgcacaaaaaggttggaaagtgtttgatatggagaagaaggaatttcttgtttctcgtgatgttgtttttagggaagatgtttttccttacgcagctacaaacactgatcatgtgtctgcgtctccggctcctctccttgttgatgaagattggatggtctccacgaccactctagacagggggagctctgctgttttgtctgcaaataaaaacacagaccctaaaccgaattctgttactaaaccggacgattttgctgaaccagaatctgttactaaaccggacgattttgctgaaccagaatctgttactaaaccggacgattttgctgaaccagtatctgttactaaaccggacgatttcgctgaaccagattctgttattaaaccggtcgttgttactgaatcaaattctgctcttcaaaccgactctgttttcgaaccagactctgattccgacgtggcacctgcttctattgcttccgatttacaaaattcacgagttgattcatctgattcatcgacgccggataagaatcttgcttctggtgatactttggctcaaattgatgattctcctgatattgtctcaactcctaatcgtaataatcagccattgttcgttgttgacagtccgtttgttgaagctacgtctcctcgtcaaagaaagcgtcagattagacagtcggttcgtctgcaggattacgttctttacaatgcaacagtctctccaataaacccccacgctcttcccgattcttcttctcagtcctcgtcaatggtccaaggtacatcttctctctatcctttgtccgattatgtttcggatgactgtttttcagcaggacacaaagcttttcttgctgcgatcactgctaatgacgaacctaaacacttcaaagaggctgttcggattaaagtttggaatgatgcaatgtttaaagaggtcgatgctctcgagattaataagacatgggatatcgttgatttgccaccgggaaaggtagctattggcagtcaatgggtgtataagactaagtataatgctgacgggtccattgaacgatacaaagctcgtcttgttgttcaagggaacaaacaagttgaaggggaagactacaatgaaacttttgcgccagttgtgaaaatgactacggttcgtactcttcttcgccttgttgctgctaaccaatgggaggtttatcaaatggatgttaacaatgcctttcttcatggtgatcttgatgaagaggtctacatgaagctacctcctggttttcgtcattctcatcccgacaaagtttgtcgtcttcgcaagtcattgtatggtttgaaacaagcccctcggtgctggtttaagaagttgtctgatgccctcttacgttttggttttgtgcaaggtcatgaagactactctttcttttcttatacacgtaatggtatagaactccgtgtgttggtatatgtcgacgatctcttgatttgtggtaatgatggttatatgcttcagaaattcaaggagtatttaggacggtgtttctccatgaaagatttggggaagttaaaatacttccttggtattgaagtaagtcggggctctgaaggtatttttttatcacaacgcaagtatgcactggacatcatcaccgacagtggcaaccttggatgtcgcccagctttaaccccgttagaacaaaaccatcacttggccactgatgacggtccgcttctcgccgacgccaaaccctatcgaagacttgttggtcgtttgctttatctccttcatactagacctgaattaagttactctgttcatgtcttatctcagttcatgcaaactcctcgtgaggctcatttagctgcggccatgcgtattgttcgttttttgaaagggtcacctggtcaaggaattttgttaaacgcggacacagaattacaacttgatgtttattgcgattcggattttcagacttgtcctaaaacaaggagatctctaagtgcttatgttgtgttacttggtggttcacccatttcttggaaaactaagaaacaggacactgtctctcactcttccgccgaagctgagtatcgagctatgtcagttgctcttcgagaaattaagtggctacgaaagttgttaaaagaattgggtatcgaacaatatgcgcatgctcgctttatattgtgataataaagctgctattcatattgcagctaatccggttttccatgagcgtaccaagcacatagagtctgattgtcattccgttcgtgatgcagttcgtgacggcattataacaacacatcatgttcgcactaatgaacaattggcggacatatttaccaaggcacttggccgttcccagtttctttatctcatgtccaagttgggcattcaggatcttcacactccaacgtgagggggagtattgtgataaggtcgtatattctcttgatatgtttaaatccctatagtttaggagattgagtttatcacatacaatgactcgcttgtataaatacacatgttttgtgcatcaatgaaatcaagttagttcaatacctaattctacaggaatggtcggcatatctgttgtcaagagatggaactcttgctttgggaaatggttggaaaagcttttgtgaggctaatggcgttaggttaggagagtcttttactttggagttcgttaatgtacaagatacaactccggtacttaagttctcttttcgagagactaaacacaaaaatgttaattagaaatagatgacatgtaaaaattaggcctaggcgtataagtttgtagttggcttattgtaagtttgtagtttgtcccttagttccttaatttcttagggtatatattgcttactgagacatccatattgttccattttggtactttgtgcacgccattgtatctggcaaagttgagaatgtcttcagcataccatacccaaatttgtggattttattggcccaaatctagcccatatgttatatatccaggcccaatttatctgtcaagagatggggaatcttttacgatttggtcggaaaatgaaaacggagcaagacagagagataatcggagattccaattttctgtgttaatttcaacaagcatgcatttatttaccaatttgtgctcaaaatagaaaacaaaacaaaatttggtacgtgaaaagaaaattttcaagggattgtttgtttttttctgttcttcttcatcaatggcgaattcaaggatttatccgcaattcttccacacacttgttcctagcttccacactcacttggtaactatctcttgttctgtcggattagcttattcaaagattttcttctgtttcattgttgtttttgtgttgttgtagatgattcctgaagacttcttctcagagtatatcgaaggaagaagcgtcgcagagctgaaattggacttttcagacaaatcttgggaagtgaagttgtctgatcggagaatcactgacggctgggaagagtttgtggtggctaatgattttcgtatcggcgatgttgtcgcttttagatatgttggaaatttggtgttccatgtttctaatttaggacctaattactatgagattgaacacaatgatggtaagtaagttttgttctgaatactgattctgtgtttggagatcaatgtttcaatcatgtgttaggtgaaagtttgttaagaaagcgtttgcatcaagtagacttttcatcaaacaatggagatgtttgtgatagtgaaggtattaacatcacttctctcgaatgctgagtccaagtaacagtatatgaggttttaacatatgtgatatttttggtacagagcttcccaaagagaagaaagcgaagacgaacagtgaagaagcagatgcagtttcttcttcttcatcagcagacaagtcatgttttatggccattatcacagctttagatctaacgacagatacactggtatttactttactcctgcattgacctcaatatcatcccatatagaagaatcatgtaactaaagaaaatgtttgttcacgtttgctacattattcttaagttggtttatcatgaaactaaacaaagaatcgtgaggaaattcataaaatgcttgcagtatcgtaatatacaaagcggtttctaagtaaattaatctgaatcttgtgttaatttggtgcttgcagtatcttccactacattttacaagcgcaaatggtcttacacgaaaaaaccgggagattattttaacagatggaggggaaagatcaagggtattggatctgaggttcgacgaatcatctggtactttttatatcagccggggttggagaaatttctgtgatgaaaatggacaaaaagcaggaggtttctttctgtttaaactagtgggaaaaggtgaaacgctggtgctcagtttctgtcctacagaatctatcaatggggaagagaacataacaagggaggacagtaaagacgagtgcagctcgttggactcattgatgaatatagtagaaaaaaagaagtatattccgaaaccaagaggttcaccatattcatcatattcaccaagtcataaacaattcgtaacatttacgcttccaccggattatgctagaattggaaaattggtaagtttatcaatgacaactcttgattctgcgcttattagttgtgacgcatgttaaatcggcttttgttcaaatatctacagagtctttcggcgcctttcgttagggaaaatggcatcaacaagcctggggagatatgtcttttggataaacatggtagaaagtggttgacaagtcttctgctggacagtaaaggaacaatgtctttgggaaagggttggaaagagtttgttaaagcaaacagcttagagacgggcttcacactcaagttgatatgggaagaaacaactcctgtgcttagtttgtgtagtccagaatctaacagtgacagagagcaggaagagatttcaaaagctatcgagaaacattctcttttcatagatcctagcaacagggacaaaatcagcaacaatgacaaagaggagaacatgtcatgggagagaaagaaggatcatctgaaaagtagagattcaactctatcaagccaaaaacaatttgtaacaataacaattacaccttccagtgatagattggtaagtttatcaaatgactcttgtttagtggttgttagtttattgtactttgatatggttttgataaactattttgctttaactgaaatcttcaacagcgtctcccaaaggtattcacgagggagaatggcatcaacaagccggggaggattactctgttgggaaaagacggtataaagcagcagacgaatttgttattcgacaaagcaaatggtgccatgtctttgggacacggctggaaagattttgttaaagataatggcttaaagacaggtgactccttcacgctaaagttgatttgggaagaccaaactcctgttcttagcttgtgtcctgcagactgtagcattgacagagaagcaggaggagggcgatctgaaacaaaccagaaaaagtctcttccaatagaacctagcacatgtaaaaaaatcaggaaagacgtgaacatcaaagatgacaacagcaaagagaaaaatgacaaagaagagagcaaatcagtggatggagagaggaaatatctgagagggacatatttaactccatcaagccaaaaacactttgtgacattaacaattacaccttcctctataaaaaaagatagacttgtaagtttatcaaacaactcatttactcttactggttttatcccataacaagaggttattaattttaccctcgtttcatattttttccagattctttccccacaatttgcaaggaagaacaatattgacaagcctggaatgatatatctgctggatacagatggtacaaagtggctgataagccttcaacgagataagaaaggaacaatgagtttgggaaaaggttggaaagaatttgctgaagcaaatgactttaagttaggcgaatcctttacgatggagttagtatgggaagacacaactcctatgctcagtttgttacgtaccgagtttaggagttcaaaagctaacgagaaagagtcaatttcctcagaacataaaaccagagaatcatccccaacaatcaaaaaccgaatcgtgactccagcactcacacctgaagatgttaaagcctgtaaattggtaacttcatcaaactactcttgtttttcagaggtgagatagtttctctcttgaaatcataactgataatgagagatgtgttggttcaaatcttttgcagattcttccaagtcaattcatgaagaagatcaggacagtggataaagagaggaatcatctaaaagggagagatttaaatccatcgtgccaaaaacaatttgtaacatttacaattacaccaacctgtgtcggaaaaaataggctggtcagtttatcaaacaactcttgcttcagagaattagtttttttctctattttactcttactggttttatcacataataagagtatcaatttgttttctagattctttcagcgcaatttgcaagggagaacaatattaaccagcctggaacgatatatctattggatacagatggtaggaagtggctgacaacggttaaacgggacaagaaaggaacaatgagtttgggaaagggttggaaagagtttgctgatacaaaagacttaaagtcaggcgactcctttacgatggagttaatatgggaagacacaaatcctgtgctcagtttgttacgtacaaagtttagcagttctaaatctaacaaggaagagtccatttttttagaaccaaaaagtagagattcatcctccccaacaatcgtaaacagattcgtgacattagcacttacaccagaagatgttacagcctgtaaactggtaacttggtcaaactatttcttgtttctgttgttgaattataaatggtaatgagagatgtgtttgttgaaatcttttgcagattcttccaagtcagttcatgaaggctaatggcatcaacaacaaacttgggaagataactcttttgggtgaaaacggagtcgaatggccgggatatatgttgtcgctagatggaactctcgctttaggaaatggttgggaaggcttttgtgaggctaatggcgtgaagttaggacagacttttactttggagtttgttaatgaacaagatacaacaacaactccggtactcaagttctcttctgtggagactatatacaaaaatgttaattaggaatagatgacatgtaaatatttaggcctaggcgtgtaagtttttagttggcttatgtaaaaagattagaatagaaacgtttagatttgtccattagttccttaaattcttaggctgtatattatcttataatcagtttgttatttctagcaaaagaatctgttgttgtttacatgaaatgtcttggagtcttttgctctacaatatgtgaaagaaaaaatgtgaaataggcttacgcatataccaaaaagaagtttagctaattcggttagaattaatcgattagatttattgagtaaactcaataaaagttactgtagtaatactttggtactcagttcggtttagagctaccaaactgaaattaccaaacgattattctaatttaattgaagttaccaatttttatcttaaatttaattgaaaattattgaaaattttgaactctctcttacagtaaaccgacccgaaattggtttttggttccaatttgacaacaattgtatattatcttgaaattaaacctaaatttatgctattaaaactgaaccgagccgaactttactttcggtatacttcggtcaaaaaaattccaaaccaatacataggaattctgaaacatctgaaccgaaccagaccgtttaaccacaataaatatccatattaaagactttcaccaaaaagtcacttcaacagtctcttcttgagaatcaatggtctctcataattccaagaacaccaacatactgtcatcttcaagttgagatttatcacactctttccttcaagaagctgtactgtagactttggaagatttaggacttctcaagattttgaaaatggcgaatcaacatttcttcaagcctcttcttcctggcttccacacccacttggtactctcagtctctctctcgctctctttcccttcttctatatctttctctgtctatctgagaagctaaagatgagtcaggtttttatttgcatgttctttcagagaatacctgtagccttcttcttgaagaatatagaaggaagatatgagcagaagacggcggagctgagatcagatgcgtcaaagataacttgggaagtgaagatagatggacagagactcactgacggttggaaagagtttgctctctcacatgatcttcgaatcggtgacattgttgttttcagacaagagagagatatgtctttccacgttacaatgttgggacctagttgttgtgagatccaatatggttcgtgttcagacgaggagagaaacctcggtaagttgtgttctgtctctgactcttcaagaaatgtggtctgagtttggaatatggatcagttagtagagagaaccagtttaactatgtaacacttagtatctattctttttcagagaagaagaagaatccaaatggagaagcaaagtcttcttcactagatccttcttgtttttcggctaatgtggcgccttcgagtctacgttatgacttaatggtattctactcttaaatttgaattccaaattaaactatgaattcatgttgttttataatgaatttttcagctttttccaatgggttttgtgagggaaaatggtgtagtcggatctggaaagattgttctgatgaatgaaaagggcagatcatggaattttaacttgagacaaaagccatcatgcggaacagtttatgttagaggagggtgggtgagtttttgtgatgccaatggacttcaagctggagatatctacactttcaaactgatcaaaagaggaggaactcttgttctacgtttgttacccaaaggggcagagtcttgttcactagatccctcttgttttgtggctaatgttgcgccttcgactctacgctatgacacactggtattcgactcttaatttgaatcccaaaagaaactctcatactagtgtctgaaatatattaaacttattttgtattgttccagtatcttccaaagcgttttatgagggaaaatggtgtagacaaaagacgtggagagatgattctgatgaatgaaaagggcaaatcatggactttagatttgaaactaaagaaatcatgcggaacttccctcatcagacgaggatggagaagtttctgtagtgccaatggactaagagctggaagtatcattactttcaaactgattaagaaaagtggaactcttgttctatgtttgctctccaacgagccagaagaagaagtgtgctcagaagctaatgaagtagagtctctttcgacagatcaagaaagccatgaagagagtagccacaacgagaaaatctcaagaagaaaggaaaagaagggtagaatgatatggaaagcttcgtcttcaccatccgaaaaccgatttgtgacattaaatcttacaccttataacatcctacgttctgcactggttagtttcaaaactccaagccattgtctttttacagtccatcaaatttgaatcttttgtgtgaatctttgtttcagcgtcttccgatacccttcacgaggatgaatggtatcaatgaagaaactaaaatgactctgttggataaacatggtatgaagtggttaacgactctgcggttggtggactacaaaagaaaaagactgggaatggtaggaggctggaaaggattcatccaagctaacggtgtgaaggcaaacgaatccatcatgttggaactgatttgggaagaagaaacaagttgcgtccttaagttctgctccaaggtgaagctagcaatcaaatgaaaatgtatatgagtgtaatattgaaatgaatcaatgtttgactcttttatttggtaagatataactcttaaggtctaattgtactattgtagtatgttttctaagtatgttgtaattgtatgatcattggccttacggtgtgggatttgtgaatgtttgtttagcaaagaaaaggagagttcaactttatcagtttaaattagtgactaaaacattttgtgaagatttttaccgcacaaaataaagataccaacaaaagacataatatgatgagatgtacatatgaggagtgtgatagaataacttaactaatattgaagatgaatgtgaatcaaaagaaaaagttgtaaaaatctcaaaatattatagttatattcttgatacagttgggacaagtcactgatatccaaattataactgtaatagaaattcaatttttttaaggatatatgattttctatttaatttaagttattttcagcgttatatctaaaagaattgttagttacttagtttgtttagaaaaacaaaaatctgaaagaattgttaaaccgattcaagtaggttgataacaatttaccaaagtcgtaactaagtttcttggatgtttaatatcaatatgagttttgtgatattagtaattaacaaaaaaattatcacaaatttgttatctaaaatatattttgattgggctaccaatcatgaagttactttttaattaatgtgtaactagcaacccaaaaacaaatgtatttcgatttctcattattcaggttataaaacaaaacaaaagttgaattttaggagtccaaagcctggtagtactcatacaattttaaccattagacaaaaagaatattattattaatggattgaatctctttttttttttttttttttttgaggtttcaaacacaatcagagtgaattcgattataattcaacaatgtattttacatatgattgccaaaaaaaactactaaccttttctagaaagaacacttatctattgaattgtatatcacacaatgtagtagtatctaataatcattaacattaactttttcataatggaaaaaaatccagaaaaatagtagttggcctgtaataactgtaaattaactaaattacaaagaaaaaaagtaaagacaaaaaacaaatgattaataaataaaaaggaaaataattgtccaaaaataattaattacccaaaaggccccatgtgaacaaagattttaattggcccattctctcattctctctttaactctataaaacacagagcaaagaaaaaacagaggaggttgattctctttggcatctccgaatcgaatctgagaagagaagaggaagaaaaacgaagatcgatgttcgagagggaattagatgcatgaagttggattatttgtggatctgaattccttcacgcagcttatattgacgctcttctttgtctctatcggtcttctctactttgttaaaagaacggcagccaagtacttcgaggtcggtggtggctccggtggtttcgatagagaccatcgccgagatttcatggtttccgacacggctgaatgttctgtctgtgggaaggctactaccaaaaagtgctctcgctgcaaatctgtgagatactggtatgttgaaaagattcaagtttgctccttattagggtttttagattctgatttggacgtagctggagatagaagagtgaacagttttgcttgtgaaagttttgatttttaggattttagttgcatctgttttgtaaattcttttcctttttgcctatgtgattagggctttgggatttgatttagatgtagctggagatagaattggaccaattgtttagctcgtgcttccattgttagtttctaatgttttttacagaatagtcttgctttgaaagtttggatttttaggattttggtggatctgttttttgaatttggttctttttttgcctctgttctttggtactagctctgcggcatgccaaacgtcagattggaaatcaggacataaactaaaatgcaaggggtttcggagtactgactcatcaccagtgagaagagatgatatcgatttcgaagcttctctgtttgggaatagatctgcttctaagaagactaggattgcattggttcctcaacagagccaaagcaaagctaccctcaagccaacagatgtaatggtcctcgttttagtaatctgatgtttgacactctcttgattgttttcgtcatgcaagtctgaatcttgtttgcattattctgcaggttcttttcccatacgaaagttttgttagatattataactgggacagaccaataatggctccttgtgggctcaccaattgtggaaacaggtttttgttcatctggtttctagtgtagctttaacgcaccaatttaattctttttaatgatttcctttttctgttatgtcaatactctttcagttgtttcgctaatgtggttctacaatgcctttcctggacacgccctcttgttgcttaccttctggagagaggccacaaaagagaatgtaatagtttcttcgagaaatttcaatgcttcacaactcttctaattgaatttcctgtatgcatatcaattttatttctatgttttggttaacaggtaggcgaaatgattggtgcttcttatgcgaatttgaaaatcatcttgacagagcaaactatagccggtttcctttttcaccaatgaacattatctcgcggctgcctaatattggtggaaatcttgggtatgggagacaggaggatgctcatgagttgatgaggtcagctattgttccttgttggtgtaatctagcggtggagtttctgtcattctgtcagctaatgcttttaaatttcatgtgatttaggtttgcaattgatatgatgcaatctgtttgcctcgacgaatttggtggagaaaaagtggtgcctcctcgcgcccaagagacaacacttattcaatatatatttggtggtctccttcagtcacaggtgtgttttcttatcccagtagcaggtcttgtgctgtatgtgcaaattttaataatccaatgatagaccattagaagtagtacaagaataatggaaaaagtgtgtcgagaaaacacacttctgttggctttaggtttgaatcgtagagtcaccagacactaggtaataagtttgaaacagggtagcctaggggctggactggatccttcgtttcgttcgaataggttaacctacgaactgaagtagatagttcttatcaacctactcttaagagttttgtaatgtggaagactggtttctatatcctagttctgtgtgtaatcatgatcctattttccaaaaaaaaaccgttaaagtttgatggtactcatccttgcactctttttgtccctgatgattggttttattgaagatgagtgaaacttgcttcagttgctttatattcaacatatcatagctatgtttcatgatgtttgaaagttgcttcagttcctttagattatcgccctctctcttttggtactttttccctcatttgctgcattttaatgattttgcaggtccagtgtactgcttgcagtaatgtttctgaccaatatgaaaatatgatggatttaactgttgagatccatggggatgcggtatcattggaggaatgtctcgatcagtttacagctaaagaatggcttcagggagataacttatacaaatgtgataggtattgtatccctcctgaatccttaatgttgatagctcgttctgtgaatggaatgtttttctcaaacttttgtatttcttttccagatgtgatgactatgtgaaagcatgcaagcgcctttcaattcgttgtgctccaaatattcttacaattgccttaaaaagattccaggtttgggctccattatcttcccttttgcttttagttagtctcctcgctttttcttaatcttctgacatcgatggtctaattaatgtgaaactatgtgcagggtgggagattcggtaaactgaacaaaagaattagttttcctgagacatttgatctaggcccttacatgagcggtggaggagaaggatcagatgtatacaaactctacgctgtgattgttcatctagatatgttgaatgcttcatttttcggccattacatatgctatgtcaaggacttccgtggaaactggtatagaatagacgattctgaggtaagaatcatcttctgccaccgttttggttgactattatggatgttgacataaaccggatgtggttacgagaaaacaagaattttcagagatcttcttctgatcccgtctaaaaatactcgcaggtggaaaaggttgaactagaagatgtcctttctcaacgagcatacatgctcctctacagcaggtagagcctttcatttttcttgacaagaagaatatatatcctattgcagagtttgtgaattttctaggactgtattaagcgaaggagctttaacagattacgatatctggtattggtgcagggttcagcccagaccatcaaatcttagatccgaagaaagtcaagatgagaagaaaacagatacattgaacacagaatctaaccaagatggctctgttgagagttccggggtgggaacaaatgacacaagtgtgtcctcgctgtgtaacggcatcatctcacattcagaagaccctgaatacgaaaaagaatcatcattgtcagcatccgtaccagtctctgaagaaggaaaggaagttgacgtaaaggttgatacagtagattctgaatcaaaccgttctattgacatggaacatgattctggaacagatcatcaagaagaagaagcaaatgggaaagaagatccaacggttgaaaatctggctgttgattcttcttgtttggacattactactccatctccatctgctgctacagagttcatacctcaggagaacgaacgttcagacaccgagtccaaacctctggagaaagaacattcagacaccgagtccaacaaaccgctggagaaagaacatttagacagcgagtccaaacccctggagaaagaacattcagacaccgagatgatcgatgctcaatgattctaaagggatggtggtggaatcacaaacatttttcatggctcttgaaaatcaacaagggcgcttctaacttaacaataatgctgcaaaaaaattgctttagacactgcaatttctggtgtctgaaggatatatagaatttgttggatcctggagttttccatatctagaagaaatttttagggttcgtactggtgagaactatagagcttacaaagccaggattggtactttattagtcatatgagatagaaacttcaggatcggttaagttattcttttgatttttatttctctgttaaaatacaattgaacccaaaagctctcatagcttgaaagactaatggaggaccacattgtcaactttgtggttgattcaagttattttgtttgtttgttcggctagttttatatagtacttaatgtgggaaaatgtgcataacgagccgaacaagttaagaacaaatgaaaaaaatgttgaaagagaatttaaacttttacggtaacctcaactttgaagtcatttttaatcactttcaatcacaaaagcatattttccaaatagaactatcattgtcgatgataacttggtaataccaatactaattcaatcttataactattaagactttgaatagtagaaacaaaataaacgcggcaaaacatgcataatgagcgaaacggtaaggttatatcgtctcttaactaaatctttcaatcatcaatctgaatgacgaaaaaaatatgttttccaagtagaatgatcatggtcgataatacacatatttgtttgttatctctttatgtgatttggggccttttgcccatttgatgaagagttaagtttgtgaatatgtgtgtttatcagctacataaaatgtaaacagagattaaatgcaattgcctataactagattttttttttccataattgcaaaatcttcttataagttcaagtaaaattgcttttaaagcttgtaccctttttagattactagcccattataatcagctagtcactaccattttgaatttttctatccattgatttcttttcctctttactagcctttctctaaaagttgtttttcaaaaaagctactctatgagaaagattcatgaaatgttaagctttctttttggaaaaaagagatgaatttggatgttgaagccatcattgagggttagctgaagaggaaacattcacatgaaagtgtaagggatcttacaacttctttgattcttttcttcctcttctctctctcttttatctctaccattgccaagtatcaatcttttctctctctcacttgcccaaaccactcattgtctgtactctctctcgcaggtcactattaatgacccctttgagctgttgctgcttctctgtctgttgtttaaaagtgggtctttagatatcctagttcttggatctgggttgttcaaatttcttacaaagtcttggtctttaacctgaagtctgaagatttactcactcaaagtcgctacctttaggtttctcaagatgggtttagcttaaatcttccaactttgagatttgggtcttaaactctaatcaagagattcaactacttcttcttccagatttgggtcttgagctttgaaatatggctccaaggtttgatttttcagatttatgggccaaggaaacaaggagaggtacaccagtagtggtgaaaatggagaatccaaattactcaatagttgaagtagaggaaccagactctgcatttcaaccaatggagaagagtagaggcaagaacgctaagcaagtgacttgggttttgcttcttaaagctcacaaagctgttggatgtctcacttgggtcgctacagtgttctggtctcttcttggttcagtcaagagacggctcagtttcactcatccactaggctctgagagacttggtagagacggatggcttttctcagctattaagctcttcttagttgcttcattagctattcttgcgtttgagttagttgcttattacagaggatggcattactttaaaaaccctaatttacacattcctacaagcaaacttgagatccagagcttgcttcatctgttctatgtcggttggttgagtttaagagctgattatattgctcctccaatcaaagctctctcaaagttttgtattgtactgttccttgtacagtctgtagatcgtttgattctttgcttaggctgtctttggatcaagtttaagaagattaagccgagaatcgatgaagagcattttcgaaatgatgattttgaaggatcagggtctgagtatccaatggttcttgttcagataccaatgtgcaatgagagagaggtatggttaaacaaagtatcaatccttttacatggttatgtgcttcattgttgaattagattaatgaagttacataaatgtctaatccttgtttaggtatatgagcaatctatatctgctgtgtgtcagcttgactggccaaaagatcgactgctagttcaggttctagacgattcagatgatgaaagcatccaggagttaattagagatgaggttactaaatggagccaaaagggtgtcaacattatttaccggcatcgtttggttagaactggttacaaagctggtaacctcaaatctgcaatgagctgtgattatgtggaagcttacgagtttgttgcaattttcgatgcggatttccaacctaactcggatttccttaaactaaccgtgccacatttcaaggtatgtagataggtggattagtaattctgtttggttgtgtcatgagagtatgagacaaccatttttggtgaagcatctaacttgtaaatgccaatgttatttcaggagaagcctgagttaggtctggttcaggctaggtgggcgtttgtgaacaaagacgagaacttgttgacccgtcttcaaaacatcaatctgtgttttcatttcgaggttgagcagcaggttaatggggtgttcttgaatttctttggtttcaatggaactgctggagtatggagaattaaagcccttgaggaatctggaggttggcttgaaaggacaaccgtcgaggatatggatatagctgttcgggctcatcttcatggatggaaattcatatatcttaacgatgtcaaggtacgattatatcgcgtgttcttgtccagtttcatgaagagcccttagtaaatttgactgaagtagaaacaatctttaggttctttgtgaagttcctgagtcatatgaagcatacaagaagcagcaacatcgatggcactcgggaccaatgcagctatttcgcttgtgtctgcgatcaatcttgacctctaaggtatataagagctatggttttgcaatcatttgatcattccaatgattttaatggctcttttggttttcccgtagattgcaatgtggaagaaagcaaatctgatactactattcttccttctaaggaaactcatacttcctttctactccttcacattgttctgtgtaatccttccaatcaccatgttcgttccagaagccgagcttcctatttgggtcatctgctatgtaccgatattcatgtcactactcaacattcttcctgctccaaagtctttccctttcattgtcccttacctattgtttgagaacactatgtcggtcaccaagttcaacgcgatggtatctggattattccaactcggtagctcttacgaatggattgtaacaaagaaagcaggaagatcatcagagtctgatcttttagctctcactgataaagaatccgagaagatgccaaaccaaatcctaagaggagtttcagacagtgagctcttggagataagccaagttgaggaacagaaaaaacaaccggtttccgtgaagaaaaccaataagatattccacaaagagctcgcgctagcttttcttttgctcactgcagcagttaggagtcttttggcctcacaaggagtacatttctacttcctattgttccaaggtctcacctttcttcttgtgggtctcgatctcataggggagcagatgagttaagaaaccaaagtagaagaagaagaagaagaaggagaagaagataatgatgattcaagattcagttagctctgtgagttgacatcacctattaccgtttgttgtagccatagtttgtaggcatttattgattttagttttgattggtatcttctctccattgtgattattcattggtaggttagagtttaagccacactttataactatatactagataaggacccgtccgatggaggggtttattttcttataactaaaatcaaatttagcaaaaataataattaacaatgttgtaagtatttttgcaaaaaaaaagaaaacaatgttgtaagtataaattatctttcaaaactaaaaacaaatatatttatttttattgttgtattgtttacttcaccactataattattgattaaaaaaatatttgaatgaaaaatatataatataacaataactcaaattatttgaatgaaaatacatcacatagcaataacttttggtatacttatacaaaaactaaaattataaaatattcataataaagttggtaaatcaaaccaaaatggtattaaattaggcacattaaaaatataaagatgataaaattcctttaaatcatgacatatgataaaatctttgattgataactattcatgataaacgaaaaatatatcctattaattatataataagatatgtttccataataatatttttttctatcaccacctctataaccatcaacaatcaccatcttcaccagcataacaatcacatgttactcctacattttatgtcaccttgttggatatctctcttaggtagttaatattttagtattgattttttatttttggatttcgtgtaactaatatttatttcactttttctctaaattacaatacgttgttgtatgtttgtcttttgtttaaagttagtttatcttttattcattgctatttgtttattttcataattattttgaatcactgataaataaataaaatcaaaaattctattttgattcttttatagtatagaccaaattttcaattttaatgatagatctaatgataaaaactattgtatgagccggggaagcaggaaaagtgaattaagtgattcccttttttattctatctttgaaagattaagaaatactatatgttcataatatactaatttagttaagttcattttcaaaaacacgataattagcagttcaacgggaccccctcgaatatgacaaagaaagaagagttgggcctcattaagtttttatgttttcacgtttataactcagctcttccagtttctacagggatgaaccgaatcctgaatatgaaccataaaaaaaatacctattaaactgattacaagaatatcagctacagtacctattacccaaacagaaattcttccggtagtatcagcctagttcatagttatttgcatattttacatgaagatgggcttttgtttaaacattattggtatcttatcatataaagtacgatttcgactcatgagaattacttattttaatttgaaaagatagaaaataactgtaagaaaatcaaatataatacaattatagaaaaatagatatcatataaattatttgattttattgttatatgataaaaagaaaatgaataatgtaggaaaatgtgttttccatattttcttttgtgtcaaatttccatttttttttaatatgatgatataattaaatcattgataatgatgcattaaattttaaaaaataaaatagggatacatgtcaaaaggagagatgtcacgtgtcaaatttttaaatcataagttacgaggaaaacttactttattatattagatattgagattatataagcctcaagaatttgatgatggacctcatcttaggtatttttcacctttagaaaattattagctaactcaatgtacttattattgtatatgctcatattttaacttaagactccaaaaaatttgaaaagaaatcccaaacgaatttctttttaaaaacaaaaaactaattttatcaaaaataagaaatatataaaaacaaaatgaaattagcattaaaaaaaagataataataaatgtaccattaatatttagaatataaacatatcaataaatatttagaatatatgatataaagtttacattaattattaagtgtacacgtattagatgctagagtgataacgtgtgacacgtatggtaaaaattggccaatttattacagaattaataattatgggtttaagctcgacatgcggatccattatcgtaatggtagcagtagcaatctaaatttgtcgtctttggaagtattagacattttccattaacatacttttctattgtccaacatgtctttttgcacaacgcattgccatttgatttcttacaaacgtcacgtggtgctgtcttgcttcgtactttctcacaataagttgtcgtagcatgtcttactatattatttggaaaatacattttaaaatgtaaccttattttttttaaaataattacataggtataccattagaaataaaatttaaagagtaaattaattcatctctttaaaaattaaaaagtcaaatactaatttaattaattaaaaaagagaaatacattattaatttccaaaaaagtaaccaattaaaatcaacaaattagatttgatatctaaattatcatattaattttttaataattattatagttcacctctcatctttatatgattctatttttgcgaaaagataatatcatcgttataaaaaataattatagttttttcgcatttgccataatttgaatttttaaaaacgaatataaactgttcaatacatgaaaaaaatattgtaacgggtcaaaaatagatttaagaaaattttctactgagtaatgagtcataatttgaatatttatattcaatttcatacatattattttaaaaatttataatcttatatactacaataattaataacatattagatttttttatgtgtatgatgtgattcaatttttaatacaagctggaaaatcgtagaattgacgggtttaaatcgatattaatacaagatggtatactagaggtgaaactctaaaattaacaatcaaaatacaagtgtataattttaaacactaaacaatataaataatatcaacaaaacatatacaactcgcagtttactatgcatttaaaatcaaataaaataatatcatatatttataatcatctttacaataaaagtttttagtttaactaaaatataagcctatgagtaacccattcgtgttcgagtagaacccgtttgggtttgggattaatgggtatatgatttactacccaatagaataattctaaatattccgttctggtttgggtcggatccagttgggtttgggtcagtttggataaaaagtttcagacccaaaaaatacccaaaaaaatagaaacaggaaatttgtatgtagatagcgggtcttcaaacaaaaaaaacttttacatttgttaagttttaataaatttaattatatttgaatatattttactaaattttgacaaacataacaaataatttttgaatagtttagttgttttggatatttaggtccaaaattaattgacatatttagacttataattataatcttagataattagataatattacgattaaatataattaatattttggatattaaattaatgtttgggtttttgaatactctttttggataacgagtaatttccggaccaatcggatatccacggttttactaaaactctacccaataaggaaatttcctaaaattttaacccgccctaaccctgtttttggttcaattattgggttggttatcaggtccgttttttcgtcagccctatcaaagataatctaatataggccccaattaggtccacaaatagtataaccaaaatactatacaaagactaattttaagttaggccaaaaattagatcctataatacaaaagaaacatgtttcttaccaaaacaacttgtatataaattttacacatttacttaaaactacatatgttgtatttattataaaaataacatttttaaaaaaagtcaattcaatgcagcattatatgcaaatagtaaaaacattgaaaaatattatggcatcacttttatactatactatttcttatgtaattcaaacaaagaatacaatttaatttatacaaaatattaatgcccgtgctatccagcacgggttatgatctagtcccttttgtatacctgataaagtaaaaaagtatttaaatcattttaactaaaatgtataatttagttttattgaatagatcttaatcaaaacaaactattttttcttttatagagaaaaatcacataatttggactggatagcttaataagttagttcttcagatttgtgcatgtgatagttaaagggcttgtttaaaaagttgttgttttttagaacacttcattgctcttatgatatatatttacaaagtgtaaatgtgtatgtcaaataaaaatgtaaattttcagttttatttatattatcctttatactctctctgttttaattaagttgtcgttctagcactaaaattttgtttcgtaatagttttcgttttagaatttcaatatagatgtttcataaaaattccaattatatcctatttttttaatatcttaaccaagaaaaagttagaaaaacattaaacaatgataaaataaaacatttaattctttttttaatttatgtgcaaaaactttaaacgataactgttttaatttaattaccaagtattttgtttataattttggctttttaatcttgtgaatctattatttcttttttacttgcagagaataattaagtttctatataaatacaatttaattgttgtgttattgcatggttttttgtagcattattttaatattaaatatttttaatcgcagttacaaaatttaaattttacatcttgggattcaatattaaaaattttatttttgtttaaatcgttcttcgacaaattttacatgtgctttgtatctaatttacatttaatactaggatataatctgtggtacaccgtggattagtttctttataactagatttaaagttgtattatgttttgttaatattgtttgttttcttttttaagattttataattgtatttttattttttattttataatttcaccagtcatataccatctcgtaatattatcgaccaaaatccgtcctaccatataatccttcatgtatatcgtttcctttaagattgtataattagattttgatatttaagtgcatgattggttgggctttaagtcttacttacagcattaatttttcttaaagccttgattacaaaccaatcgtgctgtagctttatttttaaacctacagcccaaaaattttttattttgtttttaaggttgtagtagagtaaactctcaaagccctattttcttggctgtagaaattttaattcattagataaatacaaaaaattaaattatcaacataaatatataacaaaattaatctatggaataatcatgggtaaaatttagatttattttattaagaattcataggatttttttttttttatatcatcataatatatatttaaattaataatataaggcattttatttactataaaaaaactcttattacaactattatatttactaatccattttttataaatatttaaagttaaaaacttacagcaaaaattctacaacaataaaagttacagctacagccaacacaactacagcaaaaattctacagttacagcccaaccaatcacccactaattctaggatttcacccgtagtaatatcgaccaaaactcgtcctaccatataacatgtcccgtgaaattaaacattatttcgttattttggttggtgagcaagcaaaatctctttagcttggctagaatattagaaaactaaataaataatgattaaggttgttatgaaatttgtttcaaaaatatttatctacattttatttaggaaatgtgattagcatcaaaatcgttaacattatattaggaaacaacttgattgtcaaataatgatttgttataactgtatatacgattgatatattcttaaactgatttataagatgttaatgttgtttagctttttttgtaggagtgaagtcaattatagaagaactgactgattcaattcttgatcaaaaattttaaaagtcagatccgatcgaattttttaaaatatacttcaaaaatgttaatatagatgaaaaaacataactcaaaggttaaaagtagaggtattgaaatccggattttgagatttggattgtttctttttgtgtatcaaattatcagtgtagcctatttacaggtaagagatgtgactgaactttaggaacagcaaaggacaaaaagaaaatgcaaaatcttccatggaacaagttaatgtcaaaactaaaaaggccaatttaatttatctaaaatagttggactgcttattagactattagttatttgagggtgtattgactcatgtcagttttatcttcatcttcattagaattggcgaagccagcgcgagttcggcgcatgccaaagaagacgacctgagtacgaaccataatttactaaggttcataaatcaaaatgaattattttaatcactctgcagcagttagagtttactaactcgatcggtaagtttacttctcctattaccgtttgttgtagccatagtttgtaggcatttattgatttttattttggttggtttcttctctccattgtgattaatcctcggtaggttagagtttaagccacacttcataactatataccaatatatagagtatctacaaaaaaaagtcaggaacttgtttcttagtggatctgtctggtaaaagagtttttgccttaaaagctcttcctctgtggtttggtttctgatttaacttcatggctagcaaatacaacaataaaactaattgatttgatatacaacaataaaactaatacacatcaactgatatggtagcaagttgtaacaagtgaagccaatataataaaataaatatatatcatttcaagcattttgacatattagtgaaataggttattaatttcaacgaggttttccttggtatgttgttaatgaaagtctggtagataaatttttttggaaaaaaaatcaatgcattgatggataatagatgaaagaacgaaagtagtccttttaataaacatagcatatgaatctggacacggttcatgaatattttgggatcatatggtcacataagctatgttttgccccttgagaaattaatttcacatgtagttttactatatcatttatgttgaaattaattaacctcaagttgaaaagtcaaagcaatgtggaaattctaatttgattgtcgactgaacagagtatataaatgcatgtgaaatacgaaacgaaacttttattttggtcttaatcgaaagagagatgagggtactttttctcttcgtcttagttcttcagctttcttctaaatatgaatcgaaacttgtatcgacagagccgtttaagataactactcgaagaaacattttgtccccgacgaaagtctctgtgcttggtttttttaaaccgtcctcaacttcgcattggtatctcggcgtatggcaccataggtttcctcaggaagtggtatgggttgcgaatagaggcaacccactctccgagcccattggaaccctaaaaatcatggataacaacctcgttctccttgatcaacacggtacccgtgtctggtggaccaatgtgaccagcacaaatctgatgaaagggctagtgactagagagcttctcgacaccggaaactttgtattgagatacttcaacaacgacgacttatcagctgggctttgattttccgacggatgctttagtttccggtatgaaatttggctgggatgccaaatcaaacataaatagagttttgaaatcttggagaagctttgatgatccttctcccggggaatacacatacggagtggaacgtcatgagctcgcgcaaagtttcattcggaagaaaggtgtgtcaacattccggagtgacccatggaagacaaaaaatgacgtagaatatgaaagtggaaatttaacctacacgacataccgcattaccgcgaccgaagagaaagccacctatttcttcagtatcacgaatgaatccttcttctcaatattgagattgtcctataccggtgtgttgcagcggtctacgtgggttccaaaaccacaacaaatgtgtaaacgactaagggatcgtgttttaccacatgatacatgcggttcatacaatgtatgtggagcttatggtctgtgtgacatggacacatcaccaaactgtgtttgcacatgggtttgaggcgagagatcaagaagcatgggatttccacgactggacaggtggttgtacgaggaagacaccgttgaactgctctacagatgggtttgagcagctcaggacaatgaagttgccagatattacaaagtctattgtggacaggagtattgggttggaggaatgccatggcaagtgcattgagaattgtataaattaatatttcaattaggaaaaaaaaaacacctacacattatattgcatgactgatgggtttagactcagcattggtcaaaatggtagcagtagcaatccaattttgtcgtctttggaagtattagacatcgtccattttgatatttttctattgtccaacacttctctttgcacaccgcattgccattttttttcttacaaatgtcatgtggtgctgacctgcttcgtactctctcacaataagcttttactcctttagcatatccatgttgtattcctgataaagtaagaagtatttacatcattttaattaaaatataatttaggtttattgattaggtcttaatctaaacaaactctttctctcatagagaaaaatcacatgatttggactggatagtttaagaagttagttttttagtttttgtgcatgtgatatttgaagggtttgtttaaaaagttgttttgtttttaacaaaaactcattactcttatgatacatgtttacaaagtgtaaatgtatatgtcaagtaaaaatgtaaattttcaattttcaattttgtcgtttaagcgcagaaatatatatttagtttaagatggtaaaagttattttacatctatatttacacattcctagaaagtattccaacaaaaaatctgttagaaagataaaaagaaaattatacagctaatttttgttaaacctaaaatgaaagaaattgttattactaatttttaatagaaaaattcgttagcatgcttttccaaggatacctttttttaatactaccctcccagtagttcattatcattgatatcactttttaattattaatgaccattttgtctttatttgaaaaatatttaagtcaacaaaatgaaagaataaattttcccgccaaaaaactttcctacaataatttttcagtcacattttttttagacaaaaaattccctcaaaatattttttctgcagggagagacatttaagaaaaaaattaaaggctttttaaaagattgacaagagttttaaaatatttataaaggtttttaaaaagttttaaaaggatttacaagtgttttaaaaggctttaaaaatatttacaagtatttttaaagattttacaaagtttttaaaaggctttaaaataatttacaaagattttataagagattaaaaaggatttacaagtgttttaaaaggattttataagtatttaaaaattgtgaaaggattttaaattcaaattctgcctgggtttttttgcggaagaattttggacgattttttctactgttagaaaagaatttggctggaaattatgtgaccagatttttttggccggaaattttgaaaaacctgaaaaaatttggtgccaaaatagatttgactttttcattatattcactcatcaaaaatgataatttagtcatttagcactgaaagagaagtatttttaaaaatgacctacatgagaagacattgttgcaaaagaacattaaaaaaatacatttttacaaatcccctttttaatacacttcactactaaattactttgtaaaaaaattatactatagttgtgacttagattaaatgattgtttataatacaatttacctgtcgaaattaataacaaaatcatcaaactgacgaagagcacggtaccatttttactgctagccattgttcttttttttctttttatgttttgttttgcttttaaattacatgaaatgtaatgaatttggtgaaacatctatttcttctatataaagaagtttcttttcctttttttagataaacaatacaaggtattccataaaccgtgttgataaatcactaaagtttcggagagagtaaaagaatttaatgacctcgtatctttttttatatttttggctttttaatctttttttatttttttacttgcagagagtaattgcgtttctatataaatacaatttaatttgttatacactggaaagttatgctgttgtatggtttttatgtaacattattttaatataaaacattttactgcatttataaaattttgttttttgatatcttgggattcaatataaaaactttgaattttctttttaaaatcgttctatcaaaaagtttaccagtgctttgcacctattaaaatatgtttttgtgtggagttgaactcatctggatctgtgtccaaacgtggagagaaagtgtcggcagaactacagaagaaacattacgcatttttcagaaccaaagatgtgtgaatctcaataatgagcattaatcaaatcatatgaaaatttgatgagatcaaacaaaactgatctactttgatgatgatcttgtttgatccaatgatctctgaacacaaaatagtcagatgatatagttctgtatttatacaaactgctgaacatttttgtggattactactacttcaagcagccaagtttttttgagttttaacaaactgatttttctaactaaaaaaaaaaagaatcagataaattatattaaaacggttaatcaaatcaatcatccactgagaaatccggctcatccggtttaggcagcatcggtatttcgacatccttgagcttatgagccgtccttcttgtgttcttagcaaacctcgaagcaagtatggttgcagcgaaatgcggtttcacattagaagtatgatggcgagctttagcgccgctttgtgcttctccttcatgactcatttcctcggttgcagcaaccgcaacagcttcttcttcatcataagaagagaatgactcagccaagctaagactcttagccaacttctttctcttataccgtctccaagcgacttgtacaaaacaagcagcccaagttctccactgatgggagtaataacggaatgtatgttgcagcttcttgctatgtaaacgcctgaattggttagccacgaatttgagatcacctgcttgtaaagcaaaggcttcaacttcttccaaggctcgcaccgttcttgttgaggatggtaagtttactgttgattttggtagcaatgcccatgcaagaagctcttctccacagaaatctcctggtctcagtgtgattgagttgaagaaaccggttctgcctccattagtcgtcgagctttccagttttccacggatgatgaagagcatttccgtcactggatcaccttcacgtacaatgtagttcccttgtgtgcttagagatgacgctaaccgttcacatattgcatctagtaactgatcatccatttgtgcaaatagcggtacctgaaaagtccgcgcaataacaaccaaagggtgtgcatgaataaccgttaaaccagttggaatctgttgagctgagtagtgtgtagacttacacgacgaacaagatcgagacagagatggcgttggatgtctctacggagatctgcgggtaatgaatgaagaatggtttcctcgtcaacaccgcgagtcgccagccatttatactgcacgaaacgcctcactcgttctctaagattctgcggcagtaaccgatgtcccatccattcttctgtgtctcttctcttcagtctccattcctcaagcctcaccgtgatcgattgcaaatacgtctatatacaatacatcaaccaaaaacaaaatcaacaaaataattctatcttgttacctataacaagaacggagatgattcacgtttttatacctgcatgtttccgatcaaaagagcaaacaaaaccagaccaaagatagcgacaaggatagcaaacattgtctcaagaacagaggtacttgtgctcaggttctgtccataagaactttgacaagaaagttgtgttaggaaaaaccggtaaagcgataaagaacagtgattactgaatgtgtatataccttagattctgcagtccaaaccataaacaatacaagtatttctccaagaaaggcgaagaaactacgtttttggtgagagcatccgcgaaaatcccgaatgtgaattggatattattagaaggatcacagttgctgaagacaacggttgtattctgccaattgttccgatcatcacggtgcaatgtaccacagtcaaagaaatccgtaacacattgtagcggcactgattctttgtgacattctgctttccaacacgtcgcttggcgttctatcgacaatagataccacgccgagccaagaatctacacaacaaaatgtgaaaacataagaacataacataaatcaagcctccgagatattaaggacacaatgtataccacaacgaactttagtatctagacaacaaaaaatgccaaaacatgataataacgtaacataaaaccgaggctcgagctgattctagtcccataaacaagcaaagaatagataacacattgcacctagaatctacacaacaaaaaatgtcaaaacataacataaatcgagcctcgagctaattctagtctcattcctaaacaaagtaaagacacaatgcacttgaaaaatcttatcgtctactttaaaactagcctatgacttaatgtaacttcttgtgagttgggtagtgagtctctcattagtcaactctttagctctctggtttcaacgcaaactcacatggctagcaagcatatactggaggagattgtaagcagcaccggcccaagcggttgttgtaacaactccggttgctttaataatctcagcgcttagaggaaaaatcaaataaaggcgaggaatgtattgaacaagaacgatgagcacaagagcatttgtggtatgatctgagtgagagcttctgattgatggcaagataaaccaactaacaatctgcaacaatataaagaaaaacaatcaaactctaataacaattttaagaaaaagatgaatcatgtggcctccgtgtctaggtcccagactaatccgtgggtccaccacggataaggcactggggccgaagtttaagaatccaagtggccacacaggttatgaatcaagatttgaataaatatacctgaggaagaggcaaacaagcgatgaggtcaacgatgaaatctgatctcaagtatcttctagcaatcaacttaggatctttcacaagttctccacgaccaaacactctagaagtacgagaaacataagctgttctgaatttgatcacaatgtgcaaaacatagaacaaatctgctaatgttctgaagaaagtgataacaattccaagcttcaaatctgtagtcatacaagaagatcgtccaatacgtttgactgaagaaagaaagaagaacaaagggtcgacgtaaagtgcaacgagacaccagaagaggaaaactctgttccattgaagcactgcatcaccaccaggatctagaatcttgtctctttcgatctcgaaattctctggaaacactttgaatctaccaaatcttgggattttcaaacgtgttttgctcttctttgggagtacttcttgtttcataaatggagccgttgttgatttgaacaatggtactcgcttctctcctacttctatggtttgtttctcgtctccatagaatctgtcacacccatcaaccaaccaaaaaaaaaaatagagtttgtgtttaaaaaataagatcaagaaacgaatcattccaaaaagaatgtactaatgcaatgtataacgatcataactttattgggatcgtaaatgcaaaaagccaactttattttccatcattgagagaacccaaaaatgaatgttctaaagaagatgaaaaatctagaacctgacagtattgtctctcttgaactccattgtttgtagcaataaaaactttaagctaaaacaagaatagattgttcttcttgtttaggcaatgagaaacgaatcagagcatgagaagatattattcatgttcagaaaatggcagagacagagagagagatgggtttgactttacgtgaaacaacaaaagatgaagagagagagagaataagtagaaacagctaatgtaatgcagctaagagagggtaaaaacgagtgaaagagtaatactaacaaaacttttgttgttgttgttgttgtttttattttaatgttctcttggaaattgtaaagaaagagagacagagaagagaacgtgggttccattaaagccaaatttgtatataaaatttttgttttgaaggagatgatgatgatgatgatgactctttctctctcgagtctcatactatctcccgtgtgttgcgtacaagattctgtattttacatttttatatatgacttgtggaagtatataatatgtctacatttaataccatcacaaacttacaaaaagaaaaactcttatactgtattctatatattgagtaaaaaaagttatcaattagaattgagaaaatactaatgtttaaaatttcgctagacgctaatcggacggttgaatagtatctaatatccaataaattaagcagaagtaatattatttaggtaatgtgggagtttctcactaaaactagatagtcttaattgtttgtaaagttgtgtcttggagcaagggttgtttgcattagtccggtcggtgaagttttcttggctagactgctaggatgaggaatcaagtgctggacgtattgaaacattatccggacatgataaagacaataacaaaattgcaattgaacttcgtaatcatgaataagtttgttacatttgcttaaattaattaacatgtcttttcttttagttacatatgagtatattaatttatgagaaatctgtgaaaaaaaataaaatgacttctcaaatttttacccctaacaattctgatggactgtatctttatagttgatgttttagaagaaaataaaatgtttcaaattagatgatgatttcaattttaatactaaattaattatttttgactatttatatcatagaattattttattattggttgatttgtgtctaaatagattatcaatgtttctttaatttagaaaaaaaaaaaaaaatctaaacatcaactataaaaatacggaggaagtatattggatggtttgctcttgtgttattaattttagagatgttcgtgtaatcatctctcttgtggccttgtgggatcagtttgcggaaaatgtgtacaatttcacacacacacacacaacaaaaccccaaacggtactcctatatataatcgagtgtttcagtgccaaaatcagctgttttatggttgaacaaaataatttcatcgtactttatagatttgtgattaaaagacacatccccacgcccaatttcttgaagtgggccatttcaagtctttttattttgtaagacaaatatgccaccattcaattctactcttattaaaatttattttttgctaaataaaatatgtaataaaagtataatataatacttacaatgtgatgcccactctgttatttcagactcattaggcttgcatgctattcttgagaacgatcaaatagcaagattaaatgacttgaacaggacgaacaccactatcacatcaaagagagtacgatgactgtggaaactaaaaatgttcattattttgaatacgatcatttgctaactaatagtatatcctctcctattaatgagatattctctcatatcaatcatgttgatgtaaattgattctgattgtatcctctcccattaagatgattgatatgagagaatatctcattaataggaggggatacgctattacaaaccatatcgttatcgctaaacttttctaactcgagttttattttaataatgcgtattaatgtacaagttgttccactcaactcccaagtactccttcctagtgtggctcgcaatgcacaatcgtcttacaacgggggataggatgagtctatggaatgtgaatgtacaagttgaacccatcaacggaatacggaagctatgttcctcatggtgtcatcaatggcatgaagtttgtactacattaaattgaatcatcttacccctttctctccatagctcacttattgtaactaggagcaatcttggagaagataggtaagtcagaactcagaacatgagaactttttaatcttttagtactcaaagaccaagtcataagggttgtgcttgagactgacattagctttaattgcgcgtcaaagaaagagagaggaaccagtggcatggccaagccttttgttttttattttattcaattataaacgcgtctttttttgtctgtaactgtaagctgttgagtgttgactatatagggtcaaagtcttctggccaagaaaattaaactacattgtataaaacaaaaaaaaattaaaaaaacatcacactacacacttcatatatacccaacaacaaccagtgttaaatgaaaaagaaagaccaagaagccaaaacgtcaagatgctaacaacccttgtagtctaaccactcccaagatttaagaattttcttacttttgttctagttttgttgagaaaaagatgcatccgatcttcgatgccatccttcaaaatgaccttccagcttttcttggtttggtggaagcgagagaatcttccctggaggagagaagcgaggaacagaacaccaacaacacggttttgcacgtagctgcaaagctcggtcaccgagaactggtcgccaagattattgagctccgaccttcccttctctcttcccgtaacgcgtacggagacacacctttgcatcttgctgctcttcttggagacgtaaacatagttatgcagatgttagacactggattggaactatattccgcacgcaataacaagaaccaaacacctctccacttagctttcgttagcattttcatggaagctgccaaattcatcgttgaaaagacgaattcagtcgaccttgatgaactcaatttcgccttatcaagtggatctacttgtaagtttatagtttataaactcataatttttcgtaattcttgtataaactcactggctcattatcacattttcaggtattgttgggattatactggagagatttccagagctagctaggaaaaatgcttgggaggttgaagacggctcgcgatcaacgttactgcattatgcgtgtgacaaaggtgaccttgaactgacaagtatattgttaggactcaatcaaggactagaagaagctcttaacagcaaaggtttatcacctctgcatctagcagtccaaagaggctcagttataatcctggaggagtttatggacaagtctccattgtctttctgcgtaaggacgccgtcaaaagagacagtctttcatctcgcggcacgaaacaagaataccgatgcctttgttttcatggcggagaatttgggaactagcagcccaattcttttgaagaaaaaagatcaacagggaaacactgtcttacatattgctgcttctgtgtcttgtggttctccggtgagtagttttctttgtccctctctagtctctcctttaagaaaccatgttttggtgtgtgtgtgtgtgtttcttctcatatattttcctgaaaaaattgcagcttatacgttacattgttggtaagaaaataatagatatcagagacagaaacaatatgggttatcgagcttatcaccttctccctcgacaagctcaagactatgagtttatatcaagctacctgaggtgtgacaccaagacttcagaagaagtggactctaaaaaggctgagagaaatgaaccacacatagggcattctgaggtaataaggctgcttaagctaatcgaaataagcacatcagagatagcagagagaaagaaaagcaagaaacatcatgttaaaagaggtcataagagcttggaacatgagatgcatatagaagcattacaaaatgcaagaaatacgatcgcgatagtggcagtcttgattgcttcagtttcttatgccggtgggataaacccgccgggcggtgtttaccaagatgggccatggaaagggaaatcgcttgtaggtaatacggcagcatttaaagtctttgcaatatgtaacaacattgcattgttcacgtccttgtgcattgttattcttctcgttagcatcataccttaccagaggaaacccttgaagaaattattggtggccactcacaggatgatgtgggtttctgtagggtttatggcaacggcttatgttgcggcatctttggtgaccataccgcattttcccggaactcgatggttatttccggttattatctctgtagctggtggatcattgacggtactcttttcctatctaggagttgagaccatcagtcactggtttaagaagatgaatcgtgtagggagaggactacctatttattttatcaaaaataaccgtgtagaagatatacctgccattgcaaaaaatgaaggtgaaatgccttccttagcaaggaccaactcagacttggccgcctcagaagggtcaggctatttcacctattgaatctttaaggtaaattttctacgagactactctctctggtgctcgagcttttaccgtggtgtttgcagcctatcttatgggttttgagtgtctaaagtgattttcttgatgagcttcttctcctcacagggaccggcacaagatttacttgaagcagatttatattgccattgtatgatgcatccctacttaaggagtttcgtgtaaactggtctcacctatgttatctctatcatttaaagtccaaaaagaatgaaaaatgttgtcaatgatgttttacatgttttatatcaatactcagtacatgtttcatcaaaaataacaacttcaaatctagtcacttgaataagtacgaacacaaaattgctcgattctagttgttaggagatatcgtcgtcatcatgtttagttgattatgatgataagtaaaacatatgacaacaaagttttgctaaatataaaaagtgaacaaactcatgaagttggatatctgtaaattatttttcataaaaaataagtattttcaggacacaacaaaacaggacaaagataagaaacttatgaaaatctactccttttactagggttttaaaccaaagcatcatcagaagaggaggcagccaaaaagccttcaataaagacagaatgatccttgaatcaaacatgatgaaattgaaaccaatgagcagaaaaatctctcgtttaaagattagtccatgtaccaaacgtgatgaaaccaaaggaatgactattgcagatggcgataagtgtttatccaagtgcccacctcaaacaaagcagagacgttctacatactctaaactattctacaccgtaagacaagtttcttcgaagcctgcctgaaaggtattaaatacctgccagagtagcaagtgcaactcctcggccattttaagttcaagaaaagcaagaccagcaatcatcagagccgatgaagttttcaaacataagagcatctagatgagaagcagagtagatgtgaactaacataaagatcccaaagcaggccgatcaaaataaccaagaagccagaagcagttaagcaatgaagcagaagtagtggtaaacaattatgaagatcccaaagtaggcagatcaaaataacgaagaagcgagaagcagataagcaatgaagcagaagttgtggtaaactactatgaagatcccatagcaggccgaccaaattaaccaagaagccaaaagcagataagcaatgaagcagtagaaacctgaagaaacctcgagatgatagaacaaaaaacaaagaaaatgcataggtttttagcagagcttttgtttatgtcttttaagaacatgggtagatatttaaaagtactttacctaacggcagatacaactatggcttcataatccaaacgcaataagaagctttccagcaattcaaaagtagcaagcatatccaatccaccacacagctaaaacatattctcttagtgaaattcacagatactaatttcctctcctcttgacgtcacaagcaaatagttgtctcctgatcccataatttgctatctagacaagtaacactcagctccggcttctgcgcacatctttcagaccatttctgcataaacaaatacaaaaacttatcagccacatggactctgttttttaacacaacgtctaacaaaaaagtctttgggacgataatgccactagttcagtttcaatttcttatattgattgagatacagtagactcaagagcaaggggagttttacccattagcatatggcacctcgtcacgtgctctataaggtggtggtgacctactgtagttgcgaccacgaggagaaggactacgacgtcttggaggaggaggagatctagcacgagggctgtaacttctgtgaaaccaaaagacaaggtaataaatcaatgaggtagaccaatttcttttagttgcaaatcgtcaatcagaaagaatagggacaataaccttcgtcctccataggtaggactctttctgtatctaggaggactgcgactacggctgcggctacgacgcctaccaccagaaccaccacgagaacgacattcacgtgcaaagtgaccagactcaccacactcatagcacttcaaatcagaaccaccacgtccacgaccaccatcacctcctccacgaccaccaccacgacctccaccaccaccacggttatgagactgctctaccctccatccattcttgcctaccataacaatatagatcatatatatatcaaactcataacaactcataacaactcataaaaccagaccagtagaatagaagaccaacgaataccatctacttcacggatggcgtcacgggcatctcttgaatcttcaaaatcaagaaaagcgtaaccaggaggtcttctagcaacccagacactgcacagacaccaaaagaacaatgaggataaatgcaaattcacacactttacatcaactaaaaaccaaaaaggagtcaatttatgtacctcctgatcacaccaaaggaacgaaactcatcctcgagttcacgttcagtaactcgcggatccaaattaccaacatacacacgcgacatcctcaagttacctatcaacaaaaggcttcaattcaaaaactttgaaagcgatgaattcaaaaagatgaaatctatagatcgaaactacgaatgaatctggagtaaagaagtgacaacggagatcgggatttacctgaagaaacggctttggctctttctcttgctcgtctgtgagaaattagggttatcgattcgaaattgaagatgaaagttattttttgtgggtcaactttaaatgtccttcaaaagttattccttgatttgggcttaaaatgggccgcatgcgatatggtacagtaacaataatgcctcatattcatgcaattactgattataaaattaaaatgtcagatgttaaataataataattcaaaattaaaaaaaagctctcagcatataaaaggaattcaaaaaaaaaatgagtatcactcttaagtatttatacgattttcaaaaaaagttgataaaacttaccgaaaatacaaaaaaaaaagaaattgaaatctacataaatccccaaaaactacaacacaacacaaggagaaaacactaagaaaacacaagcgaaaacttcacaagtagagatcctgagaaaaacactgtttctaaaccccaaattgaaatctcgtcgtaaattcaaattttaattaaaaaatataaagaaagctcttttctatgtccactgaatattttatgtaaatgaagaaagctctttttatgctcatacttttatgtatatactaacccatacatctcagatgatgaggatgagagaggaaaataaaacttaagagggagactatttgacccaaaaaaaaaaaaaaaaaaaaagagagagactattacctctagtttttgaactaagtgaagaaaactatttcgttcaaatttttatttataataataattcactcattaagcatcacaaattagacaatagatgcatcagcctatttgtaggcctaaccaatcctctactttattcatcggaatcgatcactagatatatagtcgataggcaaacaaagatataaccataaaaaccaattttgacactattatttatttgcgtaatgctagtaggtgtgtacaaatgaacataattatgaccatgacaacggcatggtaaccactcatgcctcgaagttcaccttctgctaccaacatatttccatcacatcatcctagcattattaaagaggctaagatacaaccttttagctcttctaatgctaataatcctagcatcatcctagcattattaactgagtgcatctttagctcttctaatgctttttctagagaagaaatggtttgaatcacccttattttactaataacatatttgggtttaagatgagtttctaacttaaaaccaattggcaatgaaactaatcatttataagtatattacttgataatttttctaattttcgagtgtaactttctctcattaacaactaaccattcgattattttaagaactttggttttgatacggttcagtttggtcagttattaaaattattgggtttttttgcccatgcctatatctcccaaaatcacaatattcaaataaaaacttttaccacttgaaccatggttctagtttagaatggtttgtttggaaaagacaatagaggctaaatcgtaattttgtgctttatcacttatgagtttcacttttaaatcagtcacttaacaaaaaccggacgtgacaatatattatgtccagatattaatttgggattagcctataacatccaatcattcccaagagcaatgatataattttgtagttttttatttactatttagtgcgcacctttcttgaaccaagactccattcagtgacaggattagataagtatgtgtgtattattgaaatgtcgtcgagagtccacttgaagtttgaactatgacgacaagaattattccttttctcttctttctattcagatggagagaagctcacctcaagatttttaaaacggcactcaattacgacttattttgagaaataattaataaaatttataaattattacgtgctctattttataatttttctcttttttataggttttaagacatgaaacactgcttctatgttttttttttggtaatcaacactgcttctatgtttggtgaagacatcttgcaaatgacattacataaatcatagaaattagtttcgatgttattctaattaaatcctaaaatatggacaaaaaagagtgattctattgttcaaaaagaaaaagaagagtgattctaaaattataagctaaatatcgattttagaatgtacaagttgttcctacaaattgctaaatattcttttaagagtgtcccattcatataaaatgtaagatttttgttaataaactaataaccagtggataagggattttgtcttttcgaacaaaaacgaatggtgagcactaagaaaagagcgaagtgactctatattcattccaccatattccccaagaatacaattggtcaagaacttcacaatcacaaattcacgatcgctatgtcatccttttaatattgctatcatccctctaatttactttccattttttaagatcatgaaatttgaaatgtcacatatacatccgttgtaacttttttctagtcagaaaaaaaaacgactcgtgtttaccaatttggaacagaatcacacatttagaaggtaaattttggatcgaaaaaactttgcattttgttgaaactcccatgcaacttcacagttccaacaaatatctttagagattaatatatagcattagaaaaccaactaaattttgcgaaattacacatctaaaattcgcttgagagactatttacttaccaaaaatcatagagattaacgatattatttgtgtattcacattataggagattgagagataatgttattaacgttattaaactattaaattaacaaaaacgtttttgttcagcgaacgggaaggaagagggaaatagtttacgttaccactagtttatgttgaaacagttttggccgaaaaataggccatcattaccactataggccattccgaaatagtttacgttgtgaaagtaatatcgtgccttatttagtacaaagttgcccactaaacttacgaaatcgaatattccatagttacaaaggttaaaaaacatataaaatcatttacaaccaagtcccaaagtttttgtgctagagaaatatttattatttaggcttatttggtggtagataaccaaaattaggtttatttggtagatagccagaattttgaggtttacttgcaaaatatgataaattataaataatgagatgttaatttcgcggatttttcttacaaataacttaataatataaatatttttatttatttaagtgttaaataatacaataatttttgttttgtttttccgcctagtaaataacgacgtacgttaaaatatttaagagttcagtaagaaaggggaagaaagcgtgacacaatgttgtgaatctcgtgattatataagtggagttttgtccatttgtcaaacactatctatatatgttttgataatttcatagtcgcttttaaagagcatcaacaacaaccacacgcttctcaaacatcaaaccaagcctctctttcacttcctcatggaatattccgacgacggcagattcgacgtgattgtcgttggagcaggagttatgggaagctccgccgcgtatcagctggcaaaaagaggccagaagactcttttgttagagcaattcgatttcctccatcaccgtggctcttctcacggcgagtcacgcaccatacgtgccacttacccggaggattactactactccatggtttccgagtcgactcggttatgggctgcggctcagtccgagattggatacaaagttcattttccaactcaacaattcgacatgggtccggcagatcagcagagtctcctctccgttgtggccacgtgtcaaaaacacgggctagctcatcgggttatggattctcatgcagtttccgagcatttctccgggaggattagtatcccggagaattggatcggagtttcgacggaacttggtgggattatcaaacccaccaaggccgtctccatgtttcagacgcttgcgattggacatggtgccatcttaagagacaacaccaaagttgcaaacataaagagagatggtgaaagtggggaaggggtaatagtctgcacggtgaaaggagataagttctacggtaaaaaatgcattgtaaccgcgggtgcatggataagtaagctggtgaaaacggtggccgggatagattttccggtggagccccttgagactacggtgtgttattggagaatcaaagaaggccacgaggagaaattcacgatagacggagagtttccgactttcgcgtcatacggagctccgtatgtgtacggaactccgtctttggagtatccgggactgatcaaagtggcggttcacggtggttattggtgcgatccggataagaggccatgggggccaggagtgaagttagaggagcttaaagagtggataaaggagagatttggagggatggttgattccgaaggacccgtggcgactcagctttgtatgtattcgatgacaccggacgaggatttcgtgattgattttcttggaggggagtttgggagagatgtggtggtaggcggcgggttttccggtcatggttttaagatggcgccggcggtggggaggatactggcggatatggcgatggaggtggaggccggaggtggaggagttgagatgaaacagtttagtctccgacggtttgaagataatcctaaaggaaatgcaaaggagtatcctgaccaagtgatacttgatgtcccattgaaacattaaactttgttacaaaatgtcaactgctgaattaaaaaaaaaatatggttttaattataagtctttttctagaaatcataatgtgtgtctcgttgtttttttgttttgtttttggggcaaatagaaccatcactttgagacagcataacgagacacttcagttttggccttgggctacgatcatagcaaatttgcgataacatataattgttgttgggtcacaagaaagcctgaaggaaacaaataaggtctatagtgggaatggtggaacagagtgactaaccataaaccaccgatcctgaggactgatttctcaaagtagagaatttcttctagatagttttcaccaataccacttagtaatgtatttcaagtagtgctggaccaaaggaccgcattagtattcaacctatctacttctcttcaactaaggatcgaaatgagaaattttgtgtggtactttggacattatatatatggtgatatttaataaattttagatttagggagattacggttgcgttgaaccaacttttccattgaaatttcagttgctacatcctctcaatcttttgcctctttaatcgcctagttcaacaaagtcatccgcaaaaactttataaatatcttcaaccggcataagcaggagttagaagtaagtgcttatgataaatcttctctatcatacttctcatggtttgaataacacaaccacaaattttaatcaactttacttaaaaattaaataactttattttttgatagatgattttcaaattattacttccctctatatttgagcttcaacttgtattgaaaacccaactaagttaacatggagggttttgggcttccccctccccgatatttaatcaaaagaaactaaagatatgatataatgcacaaaccagacaaatgcaaaatctgtttaacatagttaaaatctgaagtgaaagtaaaaatatttcaaaacttaaaacgatagtacacataatactacaaactttgggttggcaaaatggagaaagagcagagcgtaggctcccgaaaaaaggtagttggggcaaagaaaatcaatcgagttcttatgtagaaagaagcaaatatttggacagggacggagaaaggtggaagaatgtattggtctcgcagaggttatttatctacttggtttaaattgaaaactataaaccaaattacgtcttagataacttctataattcttgccaatcaacaagcaatagtaattagtaaaatttaatattttagtttaaattatgatcctcggatataacaaacaactcacaagtagagtgggttgactcagaacgcaatatgacacaataatactagatgaaatattttattttgcactgacaataatattaatatttttttttttggtaaaggcacgataagattagttaggtgtggattattgggaaatatgataatgtgtggagataagtgagaaaagatttagaaatggtggatgttttatgtattggtcgaaccaaaagaatcaaatcctcaaccaaatcatcttacgtgatacgaccatgcctcaggtattattttaagttcattttgcccgtaaagtcaagcattaagagaagaataccctattactttcacgtgctaagatatattgattcagttacatactggttcaaatggtgatatagaaaatgttattaattatcgtagaataacttcctaaaagactcgtgacagattcagcatatcaaacggagagtaagttccaagggtttgttttgaaggggatgatctgcaccgcttcgtaatggttcgaattcatattttggtgcatttaactgagattgagagaagcaagagtttggaaggacaaatcgaaaaagatttcaatttttttttgaaaacattgttttgatgactaaaatgacttattttctacctgaattcatggtttagggtaaaattttcaaagatataaaatcacatacttagaatttcaaaccaaatttctactaatttacgtttaaccggtcaaattctgtaaagaatcctaatcttcattcttttaagatcataatcagctatctaaagtttatgaagaccattcattgttttaccaagtccttgttcctagcttaaatcttcattttcatttttgaaccattttgatttcccctatatctagaactcaagacatacaacttatatcatacaatctaaaaatacaattaaattctctattacgattttatactaaaacatcaaccaaagtaaccataattttttatgaataaaaatattctatgcaacaaaaaaattgttttacagcaaatgctttatagtaatcaagaggtggaattcgaaatctgagatagcactttgtaacctaagataaaaattagtgttacgggtttgaagtcaatagtaaaaacatctttcgtaagatcatattcttggcgttcgtatagtggtgagactgtttcgtacacttttgttaataactcctatgaatctccaaggcagaatggaggaatttcacaaaaagaaaaatctcaatatcatttctgatgaaattgatggtcagacaaataaaaacaaatttccgaccggtaaaaaatttaattctctaacttttaaatttttttaaacgtaatcgaaaattctttaaaaaaatattaagttaatttttttattttaaaaatataatctgagtttattaaaaaattaatcattatctcatagatattaatacatttaccaataatttatctcgtggaggttacattgacttctacaaactattcaaatcgataactctaattcgctaagtaatccccaaatcttttctcagtatctttggcataaataaagccaaatcttctcgagtgaatagcaataattatacatcatggcttatatattgtatttttctgataacaaatgtgcattatttctatcatccactaactaataattaaaaattcaatattgaccgtactattataaaaaaaaaaaacaatggttggaagtttgaaatacgtaaacaacaaaaaaacaaaaaaaaataaaacttcgttcgttagtaccgtatgaattcatagatacaacatatacaaaataagtattttacccaacatgtgtcttctttcactggtttgatctcattcgttttgcatgggctaacaaaacaattatttcaaatacgcgaagattattatttctatgcgaccattttatagaaaagataatttagataagatataaaggagacatttttagaggagataacattgaaatatatagtataatatatttttagagattcataaattataaatttagaaaaggacattaaaatttgatatagaaaaggaatttaaaagtaagtaaaagtttacaaaatcagaaatgaaaaaataaaatgcttttaaaaaaaatgtagacgtgcacgacaatcatatatattagtcggttaggtcaacgattcccatgtcgctaatttataatgcattccgttgacaaatatttaaaaatgtttcaattatacatcttgaggtctgtttttgcacacataacacgtcatatatcattgacaaagaaaacacgtcgtaattttctttttctttttctttcatgtagtcttcttggcttaaaagaattcagctaagtaagtatggttgatattttcttctacaagtgataaaactttggaatttttgaataagtataattacaagaaaacactgcatataacaactacaagaaaacactgcatataccaaaattatcgaaacatgtatattccgacaaactgaaatcaccggaaaacggtggtgtattgaaacaaagagttgttttaactgaagtttgaaagtaaacaaaagattaaaaagtaatttatagtaatgttaatatttactcatgtttctgctttggtgattagtaataaatcttctaaaatctatatgccattttataaatgcgattaaaaatttaccaattaaaccttatttagaaaaatgtagagaaaacttcaaattatctcctcaagtaggattagatcgagctgcaaattggctctttttattcatttaatttcctccattcctaactgtattggtattgtttactttatttctataagcaacaaaaaaaaaagaatcttgtggacaggtgacaatttatgagtcagccagaattgccacgtgtcggaagatcagttgccgtggtaaaaggtgttttttagattctcaaaaaaaaagtagttaaagagaataatatcaaagagtcaactccacagttcacagatccaccgttggatctaacttttggattatcaacggcccagataatagttaaccggaatcactcggttaccgaggtagtcaatagttctgtgttttaaaaagaaatgcgtccatgtgatcacttttattttatttgtagtcagcttttgttttcctactttgtcgtttttctttatcgctgttctcaactaaagacttgtagactatactaataagatatagtcaacgattgtcgctgttattatagcctttaatctctattaatgattgttaattgttccacaatctgtgtagattaattaggtaaaattaaaagtcaagaaaagattgttttcaatttactagttttccagtcaagacgttttctagaaggctatgaggtaagaaaaaaaaaatatatattaggtgcaaagttaatatgggagtcaaatattattttcaaataattattattgtcaatgcactgcaaaattagtaataattctagaaagaaattgaaataataaaaatatgctgcaaacacgagtttggtatgtgtgcaccatataatattgacaagttgtagtgttggttgaagctaaaaataacacaaaaacataaaaagaacatgaataacgcctaaaacttaacacgaataaaataaaaaaacataaaatatattatcaaaagtcaaaatcacaaaagaaattaataccattttacaattagctgaaaatttattctatcaaaatccagtcctattaaagaaaaatatgtgatttgagatgaaattaatattacatattttgatttggttcaagaataaattatggattttggttaaagaccttctaatattccaaagaaacaaaaaaaaatcagcccaattgttcatacaaataaaaacaattcattacctttaattttaaatttattgacttgaacttgaagacataagatacctaataaaagaaaaaatagatatgagactttaaaaaagctttatgattttctttagacaccatcctttaatgttttttatttgactttttgtttctttgaaattcctttaccaccattttccccaaattcaagtttacgcacaatgattcctttattttaaagacacgattataaattcttgctttgcacaaaagaagaccctacatatctcacaactcaaggagaccaaactttgattactttattccatagaaatcttcaactcaatctcagccgttagatctaaagcaccgatttgactaaactccatcttaaacctactcaaccggtcactcggtcacacccataaccccatatatcacgccaacgccattcttttttcttccagtttcgctctctcattcatcaaaaaaaacttgcacatcttctcagatcttcaagtttctcctctggtttctcatcatgaccgttgatattatgcgtttacctaagatggaagatcaaacggctatacaagaagctgcatcacaaggcttaaaaagcatggaacacttgattcgtgtcctctctaaccgtcccgaagaacgtaacgttgattgctctgagatcactgatttcacagtttctaagttcaagaaagttatctctcttcttaaccgttccggtcacgcccggtttagacgtggtccggttcattcccctccttcctcctccgttcctccaccggtgaaagtgacaactccggctcccactcagatctctgctccagcaccggttagcttcgttcaggcaaatcaacaaagcgtgacgttagatttcactagaccgagcgtttttggcgctaaaaccaagagctcggaggttgttgagtttgctaaagagagctttagcgtatcttctaactcttctttcatgtcttctgcgatcaccggtgatggaagtgtctctaaaggctcttcgatctttcttgctccggctccagcggtgccagtgacttcctccgggaaaccgccgctttctggtcttccttacaggaagagatgctttgaacatgaccactctgaaggcttttccggcaagatctctggctccggcaacggcaagtgccattgcaagaaaaggtattgttattactccacaataaattaatcatttgtttgactagcctagtagtagttaattgtttggttcgatacggtctaaaccaatcgctcacggactcagtgaaaatatatcacgaattcagatttcaaaattctttttttgcctcgaatttgtcaatcatgaacaagtctactagttaaattaactagtctcagtaaaaaataaagaataaaaatccgggtttaatactttgtagaccggtttggtactatctaaaccaatcggtcaatgtatttagtgaaagtcaacgacagtaacttaaaccaaagtgcacgcctgacaaggacaagttagtgggtgctgtcgttttgtatagggaaagtttttacgttttaaaagtctttgtctgcccgttgacttttgctaacctgatgcatgttcacgttagtcgtgtcagcgcacgttaaatcatttcactaattacaatgttttattatttaattaacagccgaaaaaatcggatgaagagaaccgtgagagtaccggcggtaagtgcaaagatcgccgatataccaccagacgaatattcatggagaaagtatggacaaaaaccgatcaaaggctcaccacatccacggtaactatcgtacaccatcgctatccaccgttgatttatttgtgaaacattggagatctaacggttgtgatttgtttttgttgatttcaggggttattacaagtgtagtacatttagaggatgtccagcgaggaaacacgtggaaagagctttggatgattcaacgatgttgattgtgacgtacgaaggagagcaccgtcatcaccagtccacgatgcaggagcatgtaactcctagcgtgagtggtttggtgtttggttcggcttgaagaattaattagtttggtagttttgtaatattttgagaaatagaggggttggttttgtaattttttttctataacaaaattagttttagatttttttttagtagtcttttgaatggattttaatcttactaccgagaaagaaaaaattcttactacattttcataatttcttgtttgatatatttagtggtgtcatgtaagaaaatgatgtttagcaaagtaattggtatataaatgtgtaggcatatgtatttaatgatatggttcgtaaagttaccattactctgtttgatctagttatgatttgtgatggttgatttaggggaaaaatgtcatttaatcccccaactttcaaaaaatggccattttatacatcaatttcatatgtggccgtttaaaacatgaactaaacgttgactaatttttaaaacatgatctttcgttgaccaggccaaaatagacatgccgttatcagtcattaacggaacttctaacgtccgttatcattcgttaactttattagtcaagtttcaaattgtggccattttaaacatcaacttcttatgtggctatttaaaacatgaattaaacgttgaataccatttaaaacatgaaaaattcgttgaccaggccaaaatagacatgtctttatcagtagaacctagaaacccgttaatgactgttaatctgtccaaaataacgtcgttcaagaataatcgaaagaacataaagattttttccatatgaaatctccatatcaaaaagttttaagcagaacccaagaacatagtttgataaagagataatcgcagtgccagtaattggaagcaaataaaggtgttttcgtttatatatttgttttaaattttaaaaggaatcatggaagcaaattgaagactcattataagattgttcgtcttgtttgagcggttgtaaaaatagatttggggaagtagggtttcatttagaaaacaatcctgattttcttttgattactctcaaaacaaagtcgttttagggatactaatagagtcgttaacaagtgataatgaatgttataagttcttttaatgaatgatgacaacatgtttattttggcttggtcaacgaatttctcatgttttaaatggtaatcaacgcttagttcatgtttaaaatggccacatataaagtcgatgtttaaaatgaccacaatttataacttgactaataaagttgttaacggatgataacggacgttagaagttccgttaatgactgataatggcatgtcttttttggcctggtcaacgaataatcatgttttaaaagttagtcaacttttagttcatgttttaaacggccgcatacgaaattgatgtataaaatggccattttttaaaagttaggggattaattgacatttttcccgttgatttaatggagggttagacttttggaatggggttgttaatgcaatgtttgactattatgtaagtttatagaaagtcaaaaagagatttcaatgagttgttgggagatattagatgtggaggttgaacaatatgaattaatgcggatttgagggtcaacgaaatcattatgatgttggaagacaaataatttttggaacaatattaaggaacatttgcgctatggaacataagttctcactaaaggtatgacacatatttgcatttgtttatgtgtatttcaaagttttgattaatatgtcatacttggtcataattgaatactttttgcagtgtttgtttatgagtattttgaagttttgttctattggatgttttggatatgatattgcccctccagcttcggatcagattccttttcaaatcgattttgtgcttgtggttgttactagaaattaagacgattgagatcttcacatatctaatgctactagtgtttataaagtgttgttacttggttgataatttgttgattgtggcttaaaaaggtcttatctatgggagaaggatattgaattctgtcgtaattttgagaagatgggagaaagaggtaaaacatctgacataacttaatttgtttagtttctcatacgatttatacaatttcagttgaactattttgtgtccatttagcatagaacacatgtttaaaaacgaattaatgtagattagacacctatttatatggatagttccttgttcgtttgattttaagatatatttttatatatttaaacgaatttacgtatggtttgagtttataaataggaattaaggtttattgttttacatttaaataaaatacgtattggtttgggttcataaggtagttagggtttgatgttatacatttaaacagaattacctatcagtttgagtttataagataaggataagggttagtattattcatttaaaccaaattataaatcagtttgagtttagaaggtaggattaagtattttgaaatgaattcttggaaatggtgttagcgtcataataattagcatagcatttttttttttaatatctgaaagttcaagcaagaaggtcttacatcttctagaggcgggatccacaacaaattattaaattcatcatatttggaaaacggattcttctcaacgggcgtcgaacccagttgggaaatttaccactttattcatatataagcatccatcaacctaatccatttcttatttaacaattgtttgccagtcatgcgttaagtttgttgctatagttaaatctaaaaccttacactctaaatttttaaataacattgtctatattcatctatgtcgtcgatatgtttagatggttgatagtgaaaaatcatagtcttttaagtatttatggacgtggtctactggataagttgatttagacattgcgaagcaaagcatcagagccaccacctcacaatcactatgacgcagccaccgtatagaaggcaacagcgatggagccaccacatcgatcgaaaccgccgacgggtttcagaatctggtccaacacatttctcgtggcgtatattttcgttggatgtcgaggctgagaaggtgatctcgaatctcttttcgacgccgtcaaatgtcaaagccattgtgttgaggaaaacaaagagagtgagaaacaaatagggagagaaaatgattacatattgttatagtattaatttattatatagaattaaatgagtacccaaataggttacttgttttcttaaaaaagttgattgtaacttttttatttgattatttttatgtaagattttctctaattttattttctaatatttttttatatgttccacctagaaaaagcaaagcaagaccaagtttatttcctaataaagataaattacattttttgtcaaaaatataataccaaatgtagtgtaggtttataatgcaaatgcattatgataacttatttattttataactctgttaatattttatagttgttctagaattattaaaatataaagtttgctcatattgtttttaaagcaaaaagtacataaaatataagcaaaatagaaaatgaattataagtaaaacatatgtaaattctcaatatttttaattttattcatccaatctctattatatattcgtatgttgtattatttcgttatgatcatgctttatatatattttttttgtttttaaattaaagctaataaatataaacttaaaaggagttaattgagtatttttttttaaatgcaatttgttttttttttttatgataagaacatcttaaaagaaggaaaaaaaaatcattatacatatgattatttgagaagtctatttgtattacatatttctaataggaaactgaaattctctataacattttaacctttaaccaaaacaaaaaacaataaaaacaaaaagataaattttcgaaaacccaattagacagggaattggattctatgtgtatatgtgtataactatggccgacaacaaattttctgagcaccaatattgttttattaccgttgagtctcggtgttctatttggtggtgagtcgatacatacaatcgatgattttttttattatcattattattattattatgactttaacgatctataattgtttaacaagatcatatattacgatttgtacattaactttttcattatgggaaccggtcttgcatcgttttggtacataagagataacaatatcgacgtcgctctagatggcgagcctttcatatatctctggcctctctacgtcatcacatgtattgccgattaggttgtgtggatctacatagccgtatacgctccttcagaagatgaccgtgtcaaattcttgaaaactaattttctaggacctatacgtcatatctttggctttacgatactcttctccttcttcattctatttctcgcttatccactctatgttttggaataccctttgccttgtggctcctaatgtccttgctctattcttttttcaagtgctatgataatatggatgaggaacagctactacgaatatatgaacacgacggactcacaattttgtcgtagaatcgagaataactaaaaaaaatttagttgttgcttcctttttttttttttttctctttaacctaatacataacttattttatttgatctatacgaggggttttaaaaaaaaatttaacttaattaactaatattttctttcgttttgtcaacaagtgaaagcgaactgatttagtatagtacttgagatccagaaaattgccaatataattatgacttaagcctcaagctaagccacacgcggatctgagtatctagaaaattgcccatataattataagtagcttcggatggatgaatcgagtcaaagaacaaaaactccgagtgatttctacacgttggagaaaaagcattacacatgaagctcgtctccaaatgccctgttccacaacatcctctcttcgtctctttaaatcctgttttagtttccacatcaatgaacatatataatcactggtcaatatttatctcataggataccttgccaaacaagaaagagattgtatcatctataccgtatttgctagggttttgcatcatgtccatcatagggtcatagacattggagtaaaggatcttgcttcctgtaagcgatgcttcgatttgaggtaatagattctgaagtttctgattgtataagacagagtctcggttctcttgttccaagcagaaccttagagcgtttcggaatttagcagtcatttgaatcggtaaacaacccatcggcggtaaacctcctaccataattttccggcaacctaaactgtaaagctcctgcacacacactagaaagattaacaagacgagtgggaaccctaaaccctatccactaagccctaaaaacttcattcctaaatgtgtgtcgaataatgcattatagactattctaactaagttattaaaatgtagttttttaaaattttattgcagaaaaaggttttgttgtagaggtaaatcgagcaaatatttgaaaacattacccgcacgaaattgtcaagcctttgaagaacaaagtcttggtaaccagaaatgtgaggaaactcaagacgccttgaaggaatatcgtaatagttcaagataaaatcgttaggccctgcacttataaccaccaaagcattttttatgatttccatagctttcttgtctcctacgatacttttaagacgagcaatgtaattcttgaacatcttttgttggtccaagacacgaatcgcttgcgtagagagactggtatggtcatcgtaacccgcaccggctgatgcaaaacagactccggttacaatctcttggtcagagagatttggttgtaagaagggaggaacaaactgtttgatgttgagttttgttgcgattatgtcggaaaagattttgccatttgtaaatcttccactagctttgtggtttgggagatcgattccgtaaggaagatgtttggctttgaagattgtttgtgagtggtagttgttgttacctgtgtcaactgttgaatcgccaaagataagaatcgctggaaatagtggttgcgatgtagcgtttgtggctgcgtcgcaggacgagagtagtgctgctatgaagagagtgaaggttatggtcttagaagtcgacattagtttgatttgtattgtgtctactgtctagctagtgttttgattaatttataaggaattttgattgtgttttttcttcttgttggaccttgctggatttctgattaaatgtgtgtgtgtgtttgtgtttttttttgctgaaaaataaaaacaaaagccgggttatagtattaataaagattttaacgactgaatagagaatatggttacctaagcaaggttttaaaagaggacctaagttaatacttaaagcaaagtgttattttttgctaaccatttttagtgtatagttttctttagataaatccaatatatatgctagaaaagaccaaatacttgggaagtgaaacttatcatattgggatgcgtctgatacaaaaacttggccccagaagttgctgaaaaatggagtcttggagatcaggtttcacatttcatttgagtaaaaggtatatgaatatatgatggtaagcgtgtttcccatttgtctgtgtcgaagagtaaaacaattgatatcactcacgggtctgtctagttctcgtatttttggcatcactctctgaagccacacaacatgagtcttccttcaacttctccaataatatattggcgttgccgacaccaaatgtcggctctgagtataagtgggagaaggttgggcttgggcttccagatctatttctatattatggggccataaatacatgcaaaatgttatccattagattaattgaactggttgactcaacccaactcaaataaatttgggttcgagatttcttatgggagaatataacccatctatttatttgatgggttgaaacttatatacttaagactcaaaagtttaaactggctatataggttatacgagtgttggaagtaattttgtgtctatcaactcgattatataaatgcggacaaatatacacacgacacaagtatacacacaactaacatgttcaattaaaaaaaaatgcggcaatcattcatcaagtcactagcaaacaacaacacagctagttcacatattcgatttatacaagtcaaactaccaattcttttcagtatcatcgtcaagatctaaagtctaacaacgtaattataaacaagaggaaatacattaacattaagagcttaacagattttgataattaatttaataacaggatgacaaaaaagtaatatcttaaaaaatgtttcatagtccaccattgaattttctaaaataaaatgccagaggtaaagctaaacaggaagataccctttagacacaattaatagacttaagttagccacatttcataaacaagattatcagttaaagagataaggttagatttatctaattggtctaatgatatccctccatatattatgttatttgatctatatcaactcatgattataacaaaacctaattgctttgaactgtataaaaaccaacatttaaaatcttaggattggatcatacaataatttgatctcatgtatatgatattgtaaaatagatgattttggattcattttacattttaaacattcatgactcagcaaagtaatttgctaattaaagtataaaataaaccaatattcgcattttgaacgagtcaaagttcttgcttccgcactaatccagcattagcaaattttcattataatatagatttttttgtatcattaacgatattggttttaattgtactaaaagtaaacgagataaggtttaatttgtccacttgtactaaactaatcattcagatagtactaattatatatttttaaatatattaatttccatttaaaaacataaagtaaatcatacacgaatatttttgtaatcttttgacttattaacagaaaaaaatcagcatcttaattttgcataccaaatattatccatccaattgaattgatataactaatcaagatttttttccctttttccacatatttctaaaacatcttaaaacatttaaagaaacaaaatcaaaatataaatggataaggttgagatatggtgtgatagtgaccaccgaactttcggtacaacgacatacatcggattaaacggagacagtaacccgaaacgtccggcaaaagtccaaacttaaaccaatgaaaactctccacgtcagcaagaccgtgtctataccgtcaaagtcgccgttagcgtgcctaggactattctatatttaggaacatgtgtttccagactcataaatacgtataaatattcgtattcaatacgtaatcgtatttttatacgatattgtcgttataaatgtaaatgagaatttattccatttttctcgttcagtgttgttttgcatttcaccttcttttgtatatctctcttcctatatcattaacctgcgctggttaaagctcttcacctacgcacatcgccggcgatttatgatcatctgagtctttcgggtatattcacaggctagagaaagagatcttaatcggaaaagtttatatggaggttatggttggttcgtcgtttggaatcggcatggcggcgtacgttagagatcatcgcggtgtttcggcgcaggataaggctgttcaaacggctctgttcttggctgatgaatcaggacgtggtggatcacagatcgggattggattaaggatgagtaataataataataagtcgccggaggaatcttcggatagttcgtcgtctatcggagaaagcagtgaaaacgaggaggaagaagaagaagacgacgccgtttcgtgccaacgaggaacacttgattcgtttagttcttctcttgaagactctcttcctattaagtaagtttgggtttggtttggtttgactcatgaatgtatctataattgtcttttactatgttcttgatctgaaaatttgatctttatacttttcttggcaagtctcatctgcgaatctgagtgttatggttttggttaaatcttgaaacccttaagttaaaatttatgatttgggattttgttatagttcaagttagttcttggttttgtttggtctgaatactgatgtttgttttgtttttgttaattttcaggagaggattatcgaatcattatgtcgggaaatcgaaatcgtttggtaatttaatggaagcagcgagtaaggcgaaggatttggagaaagttgagaatccatttaacaagaggaggagattggttattgctaataagttaaggaggagaggaagatctatgtcagcttcgaatttttactcgtggcaaaaccctaattcaatgcctttacttgcactccaagaacctatgaagaggatcatcacattcacaatgatgattatgaggatgatgatggtgatggtgatgatcataggaagattatgatgatgatgaaaaataaaaaagagttgatggctcagactcgaagttgtttctgtctaagtagtttgcaagaggaagatgatggtgatggtgatgatgatgaagatgaatgatcaatcaagtaacattgtttcttttaatacttgtttttaatttgttcttctcttgtgaatttgttttattaaagggagagtttagaggaaatttcagtgataacaaatggtggaagatttgatttgttaggaataatcattattaatctattcattagtagcagccttaagacttttcctaatcccaaaagacacaattcttcttcttttttggtgtggataacctttagttttaacttttaagaatattaatatacaattattacattatgaactgtataagaggataagttaggttgtcaagaaaaagattgggtcctctcaaatttttacatacgcaaagagtgatgttgtgccaactatttaaacgtatattttacccttttttaaattattatcgaaactacagtccaatgatctggttggttgccgacaaaaaggaaaagtaattggttggttagatttagccagtgaaaagggttttagtgaaaagagtttacaaattcaaaactaacaacaattacacatcaaacatatagcacatgacaactagcaggtgaaaactgaatagaacttttaggagacgaaaccatcctccactcaacactaaaatccccattttgcccttcactcactctcccttccgctacgttaatcccactggccaccacaaacacacgatcatcagctcccgtcacggcgaaaggacgccgcatcttctccccctgtagcttctcaccactcacgtacctccacgtgtcatcatctgaacaataaaccttcatcggaaaatcaccgtgctccgagatcacaaacagcctgtcgcggatcacgacgctcacacccgtccacccttctttcatcccaccgctcatctctcgccacgtgccttcgtcggagtcgtacacttgtcccatcggtggaaacatgaacggccacgcccatccttctgttacacacatctctttcccgatcacggctgagtcatacttcgccaacaccatcggcaacttcttcacaaccgtccacgtgtcattatctggatcatacgattcaacttccgtagttgcttctccgtttccgcccacactcccaccaacggccatgattttaccgttaacattcccggagacgaagtacgttctcgggctcatcatcggagatatacacgaccaacgattcgttagagcagtgtaaacgacggcggagcggtttacatctccgccgccgagtacaaaaagcttcccctgacgtggcatcgacgcgcatgagagtgcgtgaggagacgagattttggtgaaagagtttggcatgggaggtaaaacaaaccaacggccagatgcaaggtcaagggattgccattgaatcctagccgttgatttgttgaaagcgaagacaaataggtaaggagaagagatagaaagagattgcttggagaagaggaatctagggtttgtgatggttttgttccatgaagatgaaacagagcgatatagagcatggtatgggtaaggaagacgaagaagacaaagctcagctatatcatttggtagacctgaaatcaatggctgagattttgttcttgtttcttcttctgcttgatcattaatggtgtttatgtttgacgtagtttcttgttctgccattgttgttgatattcataagatgaaatggttttagatataaaatgttaaagtttgggaaaagaaatcaaatccatgaatgtagttggatcttgattgataaaaggtcacattcgcataattacgacatgggacggtggatggttgagagtctcgagaaaactagtggttacacatgagtccacgtttgtggttatttggagccaacaattctcagattacgtgtgtatctatgtagagacaattttcaagatagttataattgcagttactgtttccagagacagttttgtaacacgacattgtttaacattatgtcaggaccaattcgatcttcttgaagtcatgttctcctcttgctattacaagactttgttcgtatattcaatctaatataatagttgaagatgtttctggttatgatattgtgacttagacattgcagttacagattcaacaagcaaggtactaaccaatctcaatactcttctcacaattttcggatcttatattcctcttacttgggacgtatttgatcctttttacgcttgtgcaggttttgccagagcctctataggaggatcaaacaagatttctgagttgaaatgtaacatatatgttttgggtttaggatattatgaatctctgatactttcattagcaagaacagctagttatggatttattagttacacaagttccactttttctggtttgtcttgcctaagcttctaagacagtaagaagtagaacatcccaaatgtggtttatctaatactatatatgtcaggtcttgagaaataacattatctgtaatttacctggcgtcttctcgtttcactgatcacgggataggaactagttatagctcactcaagaagagttatcaatgtacctgaaaacgaagatttatccggtgacaccatcatgttataatacgactctaatcgccaaatgcaacatttttcatccctttctcctatcattctaatatcccatatggccataacaatacaagtcaaatcaagtctatcgatgaaacaaagagctggtaccataaagaagagaggcataggtttggaagggcttgaccaggtctggtaaaccccattggcctagcctctaaagcactttccagattggataattctctcaaacgaaacctaatccttgttataattacatgtaaagtagaacgttccagaaaaaggagatcctaaattaattcctaaatctcagatcttaagtattcaatccatttaattgcaatgttttgatctctgtagttctacaaaaagaagatgaagttggaagcttacactgtaagcacatgtagcatgctctacttttctgtgacatcttcttcctgctcataagcaaaatgctgatttgtttttgttctgccttttcgccgattttcctgtttgaattctgtaaagagaaaagcaggaacatgtaaagatcagttcatctgaagacagagcaaagaattacatatcgaaacttgttgaaagtatgccataagttgtgcagtgaagtgttgagcatgccagtatcatgtctaagaaccacacactagagtagcctcttatgcatatcccaaagaactcaccagaaaaactgcctgcttcatcactcaaacatgcactgtaggctgtagcaaagagtgagacttgccagaagaagacttcttcggcgttgatatttttaacattgatttacaggacaaacatgttctaactagcattgtaaccattaagctcatggcatatgtaacacaacacaagcatgtatcccataattatatttcaactagaagaaaacacgatccaaagtgagcaccataaacaggaaaagcaaaagatctcgactgattttcgacaagagaccaccgcatttaatgcatggatcggacgagaagctgagagcagaataaatccctatagcttacaacatcagagattttccctgcagtcaataccttccatatatataaataaaacttgcaaatagtctacttccaaggcataagtaatagacaggacacaaccactagtcgaaagtaaggaatgaggcaatgtattgtggactttgagagaaagaaattttccattgtaatgagaaaacaaaagcggatgtcaaatttgttattaagatatgaattctaaacaatgctaaagactaggttacatacagagcaaactgcagctattacatgattgacaatagtaccttgcaccaacttaaaagcacagtatctctgccaaaaactctctacccaattcccttatttgcctcgggtttacacacaaagctcaaaactctttgagattgccaattacttctaatcttacaacatgacaaccaacaacacgtatctttatacggttctttgagattagttccattttaataatctactaacctgctctgagtctgctgctgcagtcatagtgatgtgcttttcagctcagaactcataacttcgtctctttccggttcgtcatggaactacacagtaagtctttttgcattcaaaattagttgtccccttttggacaatatgtaacatcaacaagcatgctcaagatgtctttcacacctcaaagtcttgttcctcgaaagaccgcaatgaaattctctctcggagagttggccagtcttcgccaagctggcgtggatttaactccatggcagttctaaaatcaagcatagacacagaatgatgatcttgtcttatatcagaagacccattaggagtttgtattttcaaactgttagttggccacaccccatttacaatcttgttttgactctgctgcttgcctatacgttgtttcccaggatctccatttgtggaccgggctccaaccaaatcaaagcaagaattgatcagcttcttcagatatacatccaacatgttattcaacgtcttagcacactccatcgaaacaccttcaagaccctgtgctacagcaatattctccattcttttcctcagcatctctatatcaggtaatccaccactgtcatagcaactaattaactcagcgttggttgaaacaggtatcgttctaggggacccaccgacactagctgaacaaaatggaatccctagaggtgcaataagaggactcattgatagatttactctagcctgctcttcttgattctgatcatctctcatagacacagctgcaatcttttccttatttggtattctcggtttttccacgggacgaagaaactcaccatctttttcatcagcaacatatctgcctgatctttgataatccccattttccataccaacactacctctattgtcttctctacaaactggctgatgcaacatatgttcaaccttcccatttgaccctagtggactaggcctatctctgctcttcctgttctgcattccagacctaactttccgcggagagataggcaaaaccccgttagaccaaacaggctcatgctgactatgattagggattaaagttccactttgctcaagaccgtctcctctactctgaaaagcattcgccttagtcgaatgaccagcttcatgatctggaggtggtgacttagcaacagtcgcattcctcaagatcgaacgtatcaactggttatgtaaagagagattctccctccctaacaacctcaaacacgtcttatcaaactcactcttagtaagcttctgacttagaaacctgcctagataatagaaataccttctcgatctttcgacaccggtcttcttcacaatatgctctttcaattcacacaagctaatcctctgatcttgagaacgttgcatgattactctcaccaagattcttctacaacaaaaccagatgaacagtgggagagtgcagagacgcactctctcaacgacgtctattctccttcactcaaacaaatctaaacttcccctttttagcaattcccaaatccatacaatgcaaagccaaatctcatcttcatcagaaccaaaaccctaaaagatcatatcaacagacaaactcaaacaaaagccctcaaattttcaaaccttctgattcagtattaaaaaccctaactttgaggtcaccaaaatcataccctctcaaagaagaaacagcgcaacgccaacttcacgaaactgcaccaacaagaaagacccaacattgtcaatcccaattagaaaagctaaaaactttgaaattttcgaaatttaacacaagtaaatcgagatcagtgaagtttgaaaaagatccaaactttgggaacagagcaaagagaaacaaggaattgggtatcaaaacaatgaaattcgaattggagaaagagagaacaaggcaatgagaagcaagacataagcttacaagcagaaagaacaagtgttaaagattgattcgagacctaacttgagcaaagatttgaccagaattgttcagacaataacacggaagagagatagaagaagtaaaactttccgaccaacctaaatgatgaatcttgttcggttccttagttcgtgtgttcgattacaagaaacccaaaaatcttggattctgttgtgtggctttctcgtattgccgtcggatttgaatgtctgagcttttcgctcttctgagttaaagcttcgatcgctgcttattgggtttccttagttatttttttctgtcttttttcttcttcttttttttctctctctgcaaacgtgttctttttgatttttttttttaagtcttaattgaatcttaatagttaaataaattgaatcttaattattcaatatgtttccacttagtttttatcctaattaggaacattttttcttggataatttttttttttttaacttaatacagtatgagtttggtttgataaattatgttgattttttttaaaattcatttatgatatagtgatataataaaattgaattacaaattagttaaaatataaatgaaaaattttgaaatttaaaactactaatagaccatcgaaaaatgttcatgaatttatgcgaggattataaatgccaatcatattaactgctacataaaaacttgttcgattatagaaaaacaatttcctacaaaaaaatagagttaaaaaaattatgttgttttattgaaaattactaccattttactattgtagtagtatgatgattttaaatatcagcaaattcttaaggaaatttttgtaaactagtagattttataaggaaacttttaaaaccagcagcaaaaacaattatgaggaagaccttaaaaaaccattacaagtaagaagtcgatcatataaaccaccaagattaaaaggaaaacactgaaaactcagtagtgtaaaaaatagagacatgcctaatgatatcaatagttatagtatgtcaatcatggttccaataagttggtgtacattatgctaacaataacatcaccattacaagtcgccactacgcatgagaagatgtaaactctcaaaagttttcactcaacatcttagaaaataagctcatacagtggataagattttcttagaatcagtggtttgatttctgaattcttattcaatgttttagtggatattttataaatgtgtttcatctatatgttgaataagtgtagtgtcattttagtttttgacttttgttgtatattcattcaattttctaagattttaatttcctaaaaggataaattcttcgaaaatcatttttagattaataaaatcctaagactatcaataaaagtttcattgaattttttaaaaacatgttaagtaattaatgagtttatttttaaatgttgaatgtattcatttttgtttttgaggtttgttttaacagtcattcaaattattaagattttaatttctaaaatgctaaaactttactacatcatttttattttattaccatttcaacaaaaatattatcattaaatgttacaatggatatttaatttttttttttagtaattaataagttttcatctagatgttgaattcattttagtttttgacttttgttgtatcactcattcaactttctaagattttctttcctaaaaggctgaaagcctaaaacttacaaaatcatttttaattattactatttcaatacataaataaaaacctaagatcatcattaaatatttcaattgaattgtttttcaaatatagtttagttgattgatattgttgaataaatgtagtttattttagtttttgacttttattgtatcactcattcaacttttgttaggttttaattatcagggtaaatgcctataaccttacaaaattagtttttgtttaccatttcaagtaacaagcacgaaatttaactatttacataatattaaataatttagtatccttgacataattttccagaaacctttgattgatattgtaaattgctagtttaaggtactagataaagttttttacatatttgtgaatatagagaaagctaagcagagtattacacttatactcataagtacaaaaaacaaagatcctagaaaaggtctctttatgatcttcgacagttaaaagacaaaaggaggaaaggctattaaaactacaacagcattgtttttgtttttaaactacaacagcattaaaaggaccaaacatgtgcttatatagtttacaaattagattaaattcggtttctcaattttagcttaaacggtgtaatgttgctgaatcgtgtcaatgtcaagtcctttaagcttcaccactgactctacatgcccttttaatgtatttatctctctcagcctgcagacatcatcaaaacccatcatttagcaaaaacttgtggaacaaccgacaaagaaaatcgattttcgagtaagatcaagttttggttaatggtattgattttcgagtaatacaggcgagagagtcgggttgagctcatgtacatatagagttattagagctttgaatcgatggtgtgaagagtaagtttctttacctgacaacctcagctcggcgtttagcctgttcagcaatctgagagagttcactgtaactattcttttcgttaaagatgttgtttttctctgctggttgaagtccgtggagggttctttgagctgcagcccattgagcttctctttcctctttcccatagtctttcttcgtcgtgaaggcagtctgttttgtttttgtacatagaaaacaaaagataagcagcaagattttcataggttactccgggattttcggtattggtatcgataccttgttctcaagaagatttaaccaagcttttccactcaaaacatagcggattccaaacttgagtaagtcaagagggatgtacgttaggaaactgtatagccagatcactccagcccatccccaaccggctccttctatccgggcaaaactccagtttgcataaactgctataaatgtcgccacctgagattgcatagaccgctattaacttcttgttctgttttcatgaactttttgaacagagttcaaggaggagtaggtgcataccagctgagctatgacaaatgcaccaagtaagagaaggccagggcattcggcgtaggaccagctacgggatctggtgacgaagatgagagcctggcttatgatgctaacttgtagatacagagcagccatcatttgttcaggacgttggctcagtggtctcacaccaaaatagttctacataacccccaaaagagtttagctttttgaagtggcctagagcagcaattgagaataagagtatataccgagaaaaaatcactgtctttcatcacccagaagaaaacgactgtcatcaaggcctggtaacctccaagcacgacgccggtcgagaatatatctctgagtttccagctatctggctgtggagatggcttcattctgtcttttgatattgtcatgattgttcctataagtagcaatgcttcggttaattttatcgactgctcactattatatgcagttagtactctataaggtaaccttaccgtcgtttaagattgctatgatcagaaccatgaaaggcgaaaaatcgaactgccatatgagggcaatgaacatgaagccaaactgcagacgttacgataactttacatcaggattggattggaaccatttaaaccaaatgaaatctcgtgagacctactaagtacacttaccacaattcgtatcgtgattgaaaccgcataaatctacacagggacaaagtcaagattggagttagtgagtctgcgaataaaccgaaaaatttcatgagaataagttttaactcacagtgtaatttttcattctttggaatatggctctactggtgagtacagcactaatgataacactcaatccgggttctgtgagaacgatatcagaagcgcctctcgcagcatcagtagcatcaacaacagctataccaatatccgccttcttgagagccggggcatcattcacaccatctccagtcatgccacatatgtgattcctttgttgcagcctatgaacaatctcatacttatgttctgtttccgtgcaccagagaatctatcaataagaatctggacaagtactaggacgcatggttaagaatatagccttctattaaagtgtatatacctggaaagactcctgcaaacccatcagccttctctatcagttcatccacaggaagtgcacccaaggaagaatctttgacttgtccgagcagcgcagaagaaggatacatgttcgtacccattccaagccttcgaccggtctctttcccaattgcaagctggtcccctggtttcagtcagaagagaaaactagtttcaagcaatatgaagtgcagagagacaaggactaacttatgattcttaccggttatcatcttaacattaacaccgaggtttaaagccctcctgattgtctcggcactgtcatgcctcggaggatcaaaaagaggtaaaagacctacaagttgccatgggccaccaggagcatctttcttcttctcgagaacttcctgcaccattcaaatcgatatgaatcacaataaagaaacaaggacacataaacttcacgatatatagtaaccgaaaagacctgtcttgcaacagccaaagagcgaagtccacgctcagcaaacttatcaatcactccatgaactttcctcctaacatcttccttgcaattacagaggttcagtatctgttaacaacggcataaagatcatcagaaaaaccaatgacctgacttgaccaacatataaaacatagaaaaatcagtacctgctctggagctcctttactagctctatgccagtttccatcagagtcaacataagtcaaagcagttctcttatcaaccggattaaaagggaaaaaatgaacctctctaacaccagctctagcctctttaggatcagcaagcattccaacaatagcagcatcaatcgcatcttgattctcaatcctcgaagctctcgcagccaaaaggaaaacatgttctttaccaactcctttagcgaaaacctcgactaagttcttatcaaccgtaagcttattaagcgtaagagtaccagtcttatcacaacacaatacatccataccagccatttcctcaatagcagtcattctcttagtaatagctccttgttgaaacaatctatgagaaccagtcgccattgtaacagataacacactaggcatagctataggaatccctccgatcaacaaaacaagtaaattatcgattccgtctcgatatctccggcgttgaatcggatacattactaaaagctcaacgatgattcctaaagcaatcgaacagatacagaagttaccaatcgaagtgagaactttctggaaatggccgatttggtttgtgttgtcgacgagatgagctgctttgccgaagaatgtgtggactccagtggcgatgacgattgcttcgatttcgccttgtttgcatattgagccggagaagacttcatcgctggggttttttgtgacggggattgattcaccggtgagtgatgattgatcgattttgagaggatcgccgtcgagtaaacgtgcatcggcgggaatgatatcgccgagcttgatgctgattacatctccggggacgagaatcgatgcttcttgctcgctccattgattatctctgagaaccttcactcattaagtcattaacaaaaacattaacatatacacaaaattagcgtgtaattagtttatgctagttactttgtcatactagtaaacgtttaattaacactgactaacactgatttgaggattttagtcaattttgaaatttacaaaagttgtgtttaattttttttttttaagtgttaaatcttcattcaaaccctttttatgtataaaattccaacaaataaactgttatatcaccattgttttatataagagttaatttgtatataggcaatttatcaaaagtactattggttaacctttgtcttaggggctagaccggccatgagagcggctgcagcattaccggcgttattttcctcaatgaaactaatggttgagttgattaatagtaaacacactatccccacaaagtcttgccaatccggtggccgtcctcctccgttggccaaagcgattgccattagtgcagccacctccatcacccacgacaatgggttccacatgaaccctaaaaacttaagtaacttgctttcctgcgtgttaccccaatcacaacattaaaggagtttcatcaatgattgtttacaaagaaaaaaaagacaaaaataaagaagaaaccttcttctcttcaagcttgttaggaccaaaaacgtcaagacggtgagaagcttcatttgccgtaagaccttgttttgtacatttcagctcctcgaacacttcctccatgggtattcgtacctagacccatcatttatataattttgactaatcatttctaatggaaacatgagtaaatcgcatgggacaaatatattaactgattagatcaaagtagttactagttacgtactatacatatatgtatcttttatgtaacagaaaatttaaaattagtagggccaaagattttttaaaacatatagataatagaaaactaagaagacgtaaatatatataccagatcaacggattcattcttgatgtggtcgagttcgctgcctttacccggcggcagccgccatagtgacgccgggaagaaagagagtgaagaagaagaaaaggaaaaaaggtttaggatagttgtgaagagaagatgaaagtggagaaatatgacaaccttttaggtctttatagcgtacatgaacattaattcgtattcaaaacttcaaaagacgtcacgaaaatgtgaaagtgtgaaattgggctttaatgagaaagacttgtctatgtgtgcacttttggtaaatatatcggttcacgagttcacttctttttccatttccatgttctacgtgagatttcttctattattttgttgtgtttggatattcttctttcaacatttctggtttatatgtaaaaaaaatctcacaaaagaaaattgcatataaatcatgatttgagtaagatgtatattcttatacaaggaagtgaaatccataggagaaggtaaactgagagtccaacgtaagttatttttatttttatttttttgtaatgacttaacatgataatgtcccatgcatcagcatatgaattaaataatgatatatatgatgaaatataggttcgaccagactagaaattagagagataataacttcacgagaaaaaaggaagatcgaagtttgtctttgccatgtgaatccaaaaaggcgatggccgatggatgctcgtgggtcgtggcaatgcaaaatcatcttcccctcggtttcttctcttttatttacttatttttggccattcttcttctctgtacgtcgacggccttgtggagatcaaatgtcttaagttttggatcgttcccattttctattaacaaagaagttatatatatatataattgatataaagaagttccaaattaaagcttataattaatatcttcgagcggataacaaaatatattaaattagtttctttttcgttgtcccaaaagatcgacaaaagtgcaggtggatcagtaccaatcggtgatgtgcaataccgattggtaattaaaacttcatgatgggactatttacacatgatctaaatacttgtgatcattgtagaagaatgatccagagatattaaaccaaagaaataatttcacattttaaaaaaataaataaatattaatgaaaaagagaaagacacgtggctttaagaagtacatattcatttgggattgggaggaggagttttagtaagtttgtaatgttgatgaatttcaagaagatgtcttatgtctcttgtctcccttctattggttttgttaatgttaggcatcaccatcatcaatagattttgaccataccatttcctaacatagagaaaaaaaaagaaactcgatgaaataatttaacattttcttgaaaattcaaaacccaaccaaataaatttttgtttctcttacacacatctctgattcccacatatacttattgttcttcgacgccaccatgactctaatggcataaacaacaacattccccctctaaaaaaaacaaccacactccactttctaaatctctcggactccaaaaatccagacgcttcttatggtggttcagtcacaatttccattttacgcttatcgttttttgacaacacttctaaattttgccatgttatatttatttgctaagagtgtcacatcattttaaatgtggacctctcattataataatctttttttttccctcattattacaatctaataagttatccaattagataactcatatgcgtgattacaatagcttaattccacaattttacaagcccaagcccatttattaaaacccatttcacatgcccagtaatcaaaacctagaaacctaggtaaagatatttataccatcttttcacacatttcagtctattttttcgtcgcggccataactcaggcaacatacatcaacaatgatctcttctccccaaaaaatcaccacactatatgttcaaaaaatcctagattccaaaaatccagacgcttgtcatgatggtttagtcatatcttccacctttacattttcaaaggttcggtaatgcttctaccacatttatgacaggtaattctacaatggtatctacaatcatatttagaggtcttaatgggaattggatttagattgagttgattgatttaataagtcgatagatttgtaaaaatttcaaaagtcttgttaaatttgtagggagtatcaccacatccgtcttcaagaactcctagatctaaaaatccagacgcttgtcatgatggtttaatcatatcttccacctgtacgcttttcgaaggttggtaatgcttctaccacatttatgacaggtaattctataatgatatccataatcatatttagaagagatgttaatgggaattggatttagattaagtttattgatttaataagtcgatagatttgtaaaaatttcaaaagtattgttaaatttgcagggagtatcaccacatccgtcttcaagaactcctagatctaaaaatccagacgcttgtcatgatggtttaatcatatcttccacctgtacgcttttcgaaggttggtaatgcttctaccacatttatgacaggtaattctataatgatatccataatcatatttagaagaaatgttaatgggaattggatttagattgagtttattgatttaataagtcgatagatttgtaaaaatttcaaaagtattgttaaatttgcagggagtatcaccacatccgtcttcaagaactcctagatccaaaaatccagacgcttgttatgatggtttaatcatatcttccacctttacacttttcgaaggttggtaatgcttctactacatttatgacatgtaattctacaatgatatccacaatcatatttagaagggatgttaatgggaattggatttagattgagttgattgatttaaaaagtcgatagatttgtaaaaatttcaaaattgttgttaaatttgcagggagtatcaccacatccgtcttcaagaacttctagatccaaaaatccagacgcttgtcatgatggtttaatcatatcttccacctttacactttttgaaggttggtaatgcttctaccacatttatgacaggtaattctacaattgtatccatattcatatttagaaggggtgttaatgggaattggaattagatagagtcgatgattgatttaagaagtcgatagatttgctaaattttgcaaaagttttgttaagttttcagggagttttaggaattc

SEQ ID NO: 277 - DNA, 66237 bp, Arabidopsis thaliana
gaattcgccatataaaaaaaaaatccctcgagttttgtttgagacggtcaattcttagtggagcttgcaattttttctgtttctttggtattttttattcattagttttgttgtaatttagaaaattaatattaaataagtttgtggacccgacaaaaaataaataagtttgtggacaattttagtatatattctacaaatttcaaaaaaaaaaaaaaaaatagcattagttagtgacactataactatattacctttatttatgaagtttttcaacagttaagtagacatccataaatagttataaatcacattatagtgacatgagattacatttttatgaatgtagtactgaattgtttgaacaatttagtgatttgagttggaacactttacaataacaattgaattttcatgataaagagattttagattatttactaagtgaaaaataaaaagattcaaatcgcatgattttaagtaagagttaaaaaaaattataacacatcatctaaaatttaataaaacttaaattgatttaaggagttggtgtcacgcctgttcttaaacgagttgcgtctaatgctgtggatccaccaaaggagacgctatcacgcatcattgagcttgttttaagaagcaaagaggagaaaagtcgacgtgagatgaaatctattgtcctgaagcttcttagggaacagaatggagccaatgtagctgataacttcaatgatacaatctattcctcttgccaaacctgcttggattcggttctgtctctgtttaaacaagcttctgagggagagaaacctgagactgataccaaacagattgctgtagaagcagataacctcacgactcacgtggctgcttgatgtgttagcagaaagacaagctgcagaggaattctcagtcacatggtttgtttttgcaggaagaagacataatacattttgtatggatgtgattcttcagtcacatataaataatatctctctccaatagatactgtaatataacaagcaatcctgttataaatttcaattatagaattagaaatagtcttaaattcatgaaggcacaatatatggcaatgttttgcttaagctaaatgtctaaacattaagagttttaacatgtttcttccctaagagttcaaaacttttcaacacttaaaagctttttcaagcctaatacaatcattcgttttgttgtattagaattgttgagttttgaaaaattctgaactttttgttaaggaatctatcaatcttaatgtttctttggacatttaatttggcttaagaaaaacgttgtcatatcttgtaccttcatgatttttaggactatcattgattttatagctgaaaatatatattgattgaaatatttctgaaaacaatatgcagcaactgcatacataacaagttaataacaaagaaactcaaaacttgtccaatctgcaatgttgatctttgtgttgtgcttgttgatacaagttaataacaaagaaactcaaaacttgtccaatctgccatgttgatatttgtgttgtgcttgttgataatcttcggtattcatatgaatttttcgtttcaaaattgtgtcttctctgctactcctattcttgtgtatttgtcaacattttttatatttatatctatgttttatgcatttatgaataccagaactaatatcaaatatgtaatttgagctatctatatatgtgcaggtcggattacaggtttggaagatatgagtctataactctcccctttaaaacaagaagtgtaaagcctaagaagaatgacactgaattgggtttaaagttttcttttaatagtgcttaacatgagtgattaataaacaactttagagactcatgactggccaatagccgtatgcggtcatgttgtgtgtatgtgggactatagcatcctaagtttgtcatgtcatgcgttgtattcattatagaacatgtggtttgattttggttttaattatgtccattcaacaaaattataaagctaagacaattaaacattaattttacgacaatagacattaattgtacaactaaaacattaacatttgacgttcaatcgtaagctcaatgagaaagactacacaatgagtctatataccaaaattaaagatgttgcattcaatcttattttgagtgattgaagttattttgagttatttggtagtttaagatacattgaataaaaaggaaaaaaatctatgtacggtttttatttttcgtcgtttcgatacaactatatgactctcgctcggtcactcgctcggagtattaggcctagatatggcattgtcttttttttgggtcctttgtacaattttgtttgtaagaaaataaaagaaatgttaggttttccaagcccaaaccaactttcatatcagtatgatattgtttggtttgagtcaggtccgacccaaacattgcctagacccaatgctattatatcaaaaatctctaataggtattaaaaaaaaagccttaacatgtataaaaaaaatttgggcctttgaaccttaagcaggcactttgagtcaaatggtcaaacttgcatttctttttgaattccttcctaaaagactttatactaatttagcaagcaaaatacaattttgactttaattggataatttaaaaaacttcttgtattatttattgatattttgaatatatttttttaggtttgaataaaaataatcatttaaatgtatgagatactttccatcttttgttgttttaaaaacagaaagatataataaataataaaacgtgttgaccaaattattgtaaacttttcagttatggaaaattcattagataagtttcatacaaaagatggaatatatatatatatatatatatatatatatgttattgatatatgtatatatatacatacatacacactcaagaaaaccacaataagttcttagtaagtaacaaaactttagaaaatcagaaggtaaatatatttgttcaattgtcgtagcaaatgttagaagttttatgttgaagaagaagtttttttttttttttaaatatattgttctgtttcttgtgtgtatatatgactctaatacaaacatttcttcaaataatgactttgaaccttatttttatttttaatacatattgggttttgaaggatattcagattgcatcatctagaaacatttctaatgacaaccaagaaaacttcatctgttgtattacctttgttgctggttttcgcactcatccttatgcccatggttgcaggtaacattttttctttttagtattctactgtccgaacaccaaaaatatattttacgctctataattgatttaaatctttcagatatttttagtgggtggagtcaaaattcccatatacaaatttttttttttccctttgcaatttacatgtttaatattatattactattttttgtatttaaaatattattattgttatgatccaaataggccaacttaagtctacatgtcgtattgcggaggcatggaaaggcgcaaaggaatgtaatgcaaaatgtgcagcactaggtacgacgagagggggtgtttgtcaaaaattcctaggtgatctttactgttgctgctgggattaattcctaattaaaatgtactctcaataaacaatatgtactcgcatcggtatgaataaaagtacgttttcgaccaaatatatatatatatatatacatttgtattatctcatcctattctatgatacaattatttactcacaatctaataaatactacaaaaactataaaagaatgtccaaaccaaagcttataaaatcctcctttcaatatgtacaaattttatgatagaatacaataaatactctattaaaagtatgcaagtagaaatgtagttgcaattatcaaaagtttccatggtcaaagaaataaaggtctagaataaggttttcaaaccttcaaatcctgataaagtaggtttctaattacgtatatacattttgtgtccggtcttttgttttttcgaatttttcgaatttagatgattcgggaattggttgaagaacccgataataaccaaaaatattttaggtttaagtactatttacccaaatcttggccacaaattttttcttaagacaataacataaaacaagaaatacaccttgttcccttaaaataataatttaacaaatcaaaaactgaagttattaatgtatatatgttctcatatgtatataattgttagggatgtcaaaatggataaaactttgtggatcaatccaaaccaatccaatcaatggattaaatgagtggagaatttggatcttaatggattaaatgggttaattagttaagtgaattggattgaaattgtttagattagaatggattagtggttactcataatcaaaccaagagaaaacaaacaatcttaatcaaatgtgtaaaccaaaaataaccgaatcaaatgtctaaaccgattttagtaaaccaaagtaaacatgatttaactattagagtcatgcaattaattttctcgccaaaagcgattcaacatttttccgccaaaaacgtaattaaatatttactcgcctaaaaggcaattcaacattttcccgctaaaacgcaattcaatattttcccgccaaaaatgatttcacatttttccgccaaaaacgtgattcaacagtttttcgtcaaaaacacaattcaaccgtatcccgccaaaaacgctatttaacattttcccgccaaaatcgcaaatttacatttttcgccaaaaacacgattcaacattttcccgccaaaaaatgattcgcattccgtccccttcccaaaaacgcgattcaacatttttccgctaacaacgatttcacagtttctggccaaaaacgaggttcaacatttttccgctaaaacgatttcacatttcccgtctaaagcgtgattccataatttttccgccaaaacatgattctataattttactgccaaaaacatgattacttattttctcgccaaaacgtgattctgtgatattttcaccaaaaccgtaattctgtattttctcgttaaaacgtaattccataattttttcatcagaacgtgattccgtgatatcaaaaacctgatcagaaatgatgatggtgatgtgatcactaatgatgatggtgatcacgaatgatgatggtagtgtgatgataatgattgttgtatgatagttattagttattaatattaattattatttagattataagaaaactgtttaatggataaattcatttaatccattaattcaacaacttaaatgagttatggtttaagccaaactatttgctaaatgaattgggtatattaattatccattagatactaatccatatggattggtttgatttggtttaaccaacttgacatcccaaatcacggctatcgagtttggttcatgtaaagcccgataccagaaattattgagattagaacccgatcggtttaacaagaatcaaagtagaacgggtttacgtttttgggtcagattcgattcggttcttcaggttcgagtattatgctcagccctagtgatgacaaaaggagagtaagaaatagtgtatgaaaatgtaaagtcgtatccaaaaagatattatatatagatgcatccttcaagaatctagtcaagttcagagaatcctctccgatataaaaatatcccaatgtatcttctatctctaaaaaatgcaaatcaatcttaaaaaacatatatatactagaaccaaagccagtcctaaaaaattatgtctctgatagaagacaacataaacaataccattttggttatatatcttttactaaacaacaaacactccatcaacttaacaaccaaaaaggattagagtaagacatgaaaatcttaacatactataatcaaacattatttttatttcccggacttgggacagaatttaaatacgggccttgtgtcatatttgtacatacattctaaggtgaaagactttccaatctttacgccattagattcacagaaatatctccaaccacatcctacagatacgattccatctcttgtcaatagatctccccaccaccactccatttcatttatacccaacatatatatttttccaactttgtctatgccattagctttcatgaagtgacttggaagacgctgcaagatatttgataaacacttcttgttattgattagaattcaagatatataaaaacatattgatctctaaatcaagggtttattttataagcttaccagcataccggctttgacatcttctggtacgagtgttatcactaatcggttttcgcttagtgatgcttgattaatcatctcctctgtgttcttgtctttctcgggttcatttctatttctagcctcagtggacacatactctttctcacaagctactggaaagttctctctacgcttccttttatcacttttggaagtatttgtcccatacaaactgagaataggagagtcattttcccaaatggactccagtgtaaagtactcacctatcttcaacctattggctttcgcaaaatctacccatccccttcccaagctcattcttcctgtgctttcccgtaaaagattagccaatatcctcgtaccatctgttcccactagtgttaccatctttggttcgcccaagccattatttttcaggaatcgccttgagagatactgaaagtatttgaaatgtgaattaaatgaaatacactatcttgcaataaaacaaacaagagtttttacttgatgaaaaaaaaactcaccaatcttttgtttctaagacagtcaggtacgagtcttacagtcacgaatctctcctggtttggtaactttttatacttgataatagattgagaggggggaaaatagagcaaaggtgtttcctcctttatcgttagttcgaacacaaaaaaacttcctacctttttcccgttttcgtcacagaaatgtctccaacctctggttatgcaaaaactatctaagtttttgtcgaacttcagatccatttcccatgatctatcccctccatctgttagaaaaatcttgcggcattttttatttagaccattagaacttgtgcaatcttgtggaagatactgcaagggttcacaaaagaagtgttgtcagatgaagaagagccagtgccagtgttcacaaaaacaaaggggttcacaaaagggctaaacaatttaagtaaacgtaccagtgcatcttcctttagatttgaagccttgacaagggctacaaaagaagagttgccagatgaagaagagccagcttcggattgtgaactgttcttcctcactttttttactctttcaagctgatctgtgtcaaataaacaaatcccacatgttaaaaccatcttcggatcgaaaactttatgtttttaaaactcatcaaactaatatagaacggaagtgatgatgaaaccggtcttgtcttgatcatcatgaccttcttctgtccttagacgctgatgcttcttacttgtgtaaaacatgtaagaaatctccgttcatatagatgcaaacaaggcttttttttgtacagattttcgaaatctttcttcaaaggattgttctctcaactcagatctgactatagctcgttgattaaaaacgaaaatcatcagaacaaaacgtaccgatcttgttgatatcattgttgctgggcatgggtttgtcacggatgtcacaggcgctgacgttgaacagcatcgttgtcagtggagaagaattaattttgatattctggtcggagagaaaaagagacggagatgaaactgtgtaatgtccgaaatgattttagacccaacaaagaaaaaaaacctaatgttcagataagaatcttcttttaccttttagagagcatgcacttttgggaaatttttaaacatgggcgcgtacgtagactaaataattatgagttaaatctagttgatgattttgttaaggaatttgaccaaccttggttttgcttatactttttaaattttttgttttatggggcttctaaaattcacctttctttactagatgtaactttaatttatgagatgatttgttaacggttatttatgagagaaattaatatttcaaccaaattgacggattattgttaagtggttaagctcccgcgcaaaactaatatctttttagattggttgaaaagctgaatcggataagctattggatttgtaaaatttatttttttttgttttttttgcttctaagagttttttagaaaactttttattcttaagaagttaatttgatggataataatcgttgacatgggtttgtagtttaatttggtatggtcaaggttttattcttaggaagttaatttaatggataatactcttttttactagataagttcccccgtacaatgtttttaacaagctaagaagttaagtcagataaaatatgggtttgtaatttaatttagattggtctagctagtttttattagttttccattcaacgtttattttttttaagtaggtcttctcgtggtatgtcatagattctgttttttctacatcgattatagttatgttatacaatagttttgagggttcatctaatgagaatctatgaaaatccacaacatgacctctcaaattagcatctaagtatatagaaatacactaagtctcctttagcttagtaaaatgctatatacacatgtattataaatactagttgtaatattatgattcgattatgagaatttactttctgattatgaataatatggtatgagagcaaagtgcttaacaaactttctctctttctcgttcttctctattttcccggaaaattaaaattttctttatacatgtgttattttttcaaaccgaaatataccatatatatatgatacattattgttagattttcttttatatcattacatcatatttctaaaatatatttttctaatatgaaaaacaagagatattttccctatattttatctttattttcttcacattaaaataaaataaaatcatttgataataaaataattaaggatttttgtcggtttttgtgtcggcagtttatggtataatatcttataatttgtttctgtttttttcctcttcactttactataaatgtgagagattttccctatattttccctttattttcttcacattaaataaaatacaaagaaagatcaaatcatttgataataatataattaaggatttttgtgtctgcaatttatgatataatatcttacaatttgtttctgtttttttcctcttcactttactataaatgagagagattttcccttgattttcttcacattaaacaaaatacaaagaaatatcaaatcatttgatagtaaaataagtaaggatttttgtccattttttgtttctgcaatatatggcttaatatcttacaacttgtttctgttttcttcctcttcactttaatataaatgactcttcactttaatataagttacattttcctatattttatctatgattttcacatcatttaaagtaaaatataaagataaaaatatatgatgataaaaaaagatatacagtataagatgttaattttgattttttgctacatgtatagcagatagccctttaattagaagtctatctctactacatactgaagtatgaagtttatgattggtgtcgacaatcaagatgtttagtgacccccaaaaataattatataaaatctttaacgattcttgtttagtaaaccaatattatctgaattaatgatgatttaaacggcattttttaacatgaaaattaaaccatagaaggaaagaagtttatttgagcgatgatcctagacattcttaatattgttctcaaactttggaacaaaacttaagaagaggaactgtgtcttcccaaatcaactccaagataaacgactcattcatctcaacaccattaacctcgcagaaaccttttgaacctcttcctaaactcattgttccgatcttgtccatcagtagtgaagtacgccattttgcatcgtatctatcaaccatcgttatcttccccgcctttttgattccattccgcttcatgaattcaaacggaagattctgtagataccatcatcagattatatatcgagagtattaagtggaaaaaaaaaaacaagaaaaaaacagagttttcttgtgaaacttacaagtttacttgaatgtgtaagtgttaaggtcacaaatcggttttggcttgttgagtttttctcttctgtggaaacatattcttgtttaatagtttgtgaacattgtccttgccttatatcttcattgataggttcagcaaaaggaagagtatctttctcgctagctttaaaggagtcattacagtaaacttcttccccaagaaactcattttctgtggcttccatgccaagaaactcttttttggtaacttttaaactctgtccatgccttgtgtcattgctaggatctgcagaggaagaaagtgcttcttgttattcaattttatttcaatatttttgtttcttgaaagaataaagcataaacaacttactaagtttgtgtagatcttcactgttcaagggtaacaactggagcacaggtgtttcttcgttatggactaatttgaatttgagcaagtctcctggtttcttcccattagccacacagaatcttctccaacctcttatcgttaaaaaccggcctgtatgtgcctcatgtttcacatctatcgtccatgattctccctcttcattcattagacacatctgaaatttcttcaacaaaccatttgacataatgaacgtcttcggaagatactgcagtcaagtacagtcaccatgaatatcattaaaacacctctcagtcaaatcaaaatcaatatatgtaagtcaggagtatcataaccagtctatctcggcttagatttgaagccgtgacagtggctacaaaagaagaaaggtccggtgaagaaggagctgcttctgtttttcgaatcttgtgtcttggaagactctctgtatcaattatagaatctgattgagatttttctcaataaccaacggattatgaaaattaacttacgaagtttgtctaaatcttcaatggtcatagggaacaactgtatcataggtgtttcttcatttttgaccaatttgaatgcaaaaacgtctccaggtttcttcccattagcaatacagaaacttctccagcctcttctcatgtaaaaccggccgtaattatatgcctcgcgtctcaagtctatcttccatgattctccttcttcattcattaacacaatctgatatttgttcatcagaccatttgacaatgcaaactctttcggaatatactgcaaatgccgccacaagccaagttagatagagttatcaagaatatacaataacataaaaattactgtaatgagtaatatggaagtaacataccaatgtatcgcgctttagattcgaacccgtgacagtggccacaaaacaagaatctagtgaattgtctggtgcagactcagcttctctctttagactctttttcttacttgaaacattctccgtaccacaaagtttctctgttgatagattaagtaatattcttagactcattctaaatgtgctaatgatatttaatatgaaactaaggttaccaattttatcctcttcaagggtatcttctccgtattgaatctcacagcaacttggtcctaaagctgtgacatggaacactaactctccttcttgtctgaaaacaacaatgtcaccaactcggagatcatgtgcgattgtgaaatcttcccaaccattagagagtctccggccgtctatcttcactttccatgtcatctccgatgcatctgatctgagctcagccgtttttcctacgttagttcccactaagtacttcaagaagaacgccacaggaatgtcctgaaacagcatgctagatgagttacaaacagaagtaacttaactggtcggagagagtatagagaaacagagtaccaggtggttggtgaaaccgggaagaagtggttggaagaattgtgggttgatcggagaatagagaagtggattagccatattcagacgttgaatttttttaagtttttcttcttctgagcggagagaagatgaactaacaactttgtatcccttacttctgtaatgtaaaaaaataacctttctcagctttctatacaaaacgtcaaagaaactttctcagctttttctataaagcaatgttaaaaaagacctttatcagctttttccaaagactatatattgttttcgaaaaaaacaagttttgactgagaatagtgttgggattgaacataaagactctgattggttatggaaaatattcatcaaataaacttagcaaatatcaatgaacgagaaaaataaatcttgagaagacattggtctttaaccaaaagaaagaaaaaaagaagaagaaaaagatctgaaactaaatatgcttaattcaacacgtaggtaccataataatgtaaaaatagtttacaagaaattaaatcttaggaagtgaaaacattcatgtttgctatcaaaatatcatatggttttgacagtaaattagttagttacgttgtggattcgtttttgtcaaaaagaataagaattcgattctttgtttgcatttacgtttatatttttcaaaaagtgagtttattgtaaaactgaaaaacgttttgtatttttaacaatgtaaaagaatattttaagtacacgcaaaaaaggcttaaaataatagtgtgttcaatcttcaatgtaagcaacatttctcttgaaaccacaaacaaaaatcacgagagggaactatttgtacatcagtattcagtagcactgtaggaatacgtatcacgtgcatctaggctatctctttattccccacaaagcaaaaaaagaaaaaatccaaactaatcactacaaagtacaaagcgcaacgcaccaaaatatccatcttttcttttgtttgtgaacagttccatctattgtctccttttccagtgaaaaccaatatgtattgggtctgaatggaagaacagaggagttacggatataaagcagagcaggacaaacacaattgtatcttaataaaccaatatatccagttattcacctgtacttggttttgtcctactacaataatagatttgcatttgaatgcatttaagtatattaaaaagtggttaaactaacactattactacaattatccaaattattttcgtttctaatatttattctttctattttctacttctatgttaaaatgtcttaattgtcaaactatgaaatccacatctcactttgcgctgagaccacatctttttttcagcataaacgtgaaaatttctttagattatattaactgcatataagtataacccaaaaaagaaaaagtataaccctaattccagataagttaatatgctactagtcgttagcacataagaatttatagcattaggtttaatgtcttgcataacacgtaataaaatctacctctattgtaactttgatagtctctcttaaatgggtcatttgtttctgaaaatccttatttacaaaataaagtacaattcttcattcaaaagaaaaaaaaagtacaatagtttggtataataatagcatatgtttttttgttaaattaaagactgtcttggtcatgaacttgagacatatttaattgtgtcttcctcttgacaggcatttgttgacttgatgaacacggactcatctctaccttatcgaggtacgaaacctggtctttcgctaggaaacaatatgtgaaatttccgagtgccataacacacacaagtaacacgccaacaaacagaaacaagaaactgtctatgtcaagctgcctagaggtgaaagagggatttggatctggattagtaattggatcaggacagctttgttctttcttcttgaaccatgcacgctcgagctccattgcctttggagactctgctacttttaagatggcccttgaaacatcggccactagaggtgatccgattggaaaaacctgcgaaaaaggacttatgatctctcaccatttaatgcaattttcacataagttttgatataggaacttacaaagccgaatccatcaacattgaagggttcttcaaccattttgtatgtgttgcaaaactgtccaagaaagagtctcaagtaaggtatttccaagaaagctccagagacaccacctttttttggtcctttacttagaagctcatcacattcttctgcagtatcaaagggcacaaggctagattgcgggaaacctctttctttaagctttccaaggatgaaggatgttcgctgataacccactgtttctcctttttcaagcaaactactcatgctggttattgttggatttaatttctgtgatgtcaaaagcgatgccaaactcgctgtgtaactctgggttaacacgagaacgagaaagtaccatgcgataaccagggccctcgcccaaaagctaaatactctttctcctgcagacagggaatcgagaataagaatcaagcaaggtgcatgatatataggaacatatatatgctgacatgtagagaggggagattaaatgtacttggagcaaaaaccatggtagagaaggcaaaccaacagatggtactagcttggaatctaggcggtccactaaagtccggattacgcttatattcgagaacccatacagtacaaccgacaaggaagaaagagataaaggaagtcaaccatagtttccatgacaaaggtttcatgaaaagtatatagtctctctttactgggtctgtcatttcaacgatcaatccgacacctgatttaataaatgggaatgtgaagtcgacgtaagaagacctgttcaccaatatggttgtatctcccacaaccgcatcatatctctgtgacagagaagcaaataagagttcacttagtatagttataaatgctatattgatgaatgattagtatgtgctcatactcaccccgaggtacacttggtagaccaagtcgttgtaattaccggctgtttttccgtcgggtttttcgaaaggtatgaactcatatgagacgtcataaggcagttctcgaatcacagcctcaaagaaatctatgcaaaaacctgtgactacagttgaattggtaataggatcccttgtgactttcacaagatcagtgtagccggttcttttgggaactccaatacgcaacttcttccccttagtcgggatctgccatcctttcggaacagaatccgcctctccaggccatacaatgtgtttaagatgatctttccaagtagataaagcgcttatgctacttgcttgctgatcaagtttcttcacaagaccatttccctccttccaaaatcctattgatttttctccggtattgattatattgacaatctcaaacaccgatggttgcagttgcccgcggaaaaaacgaaactctcctgcaagtcctctgaactgaactgttaagagtgtttggagaagctttggaccgaactgagataaaccaagagcttcaagttcagaaacattcctccctgtatccaccactttactgaaagtcatgttatttgttccagcttcttcaatggctaccgctagtgcggtggtagcatcataagcccacagaccatagacactcagctccacccgtgggaataaacttctccatcgagatctaaacttctcaagatctggggattttggaatataagttttaatacccaataccccctccatagcctcaacagccgtctcatttatcaaacttaagtcatcgataactccattggtaaggatccagacatatcctggttccatcaaaccaagctcttttgctttaatgaagaatcttgaggcaagatcatagtacatgtggacaaggaacactcttgtgggcatgttcatcatcttaagaagctccacggagatttcatgatcagtggcattgatagcgataacggatctataaggtatccggacattaatatcttgtaaagcatcggtaagacgaggcattataccttcaccaaaggtgttgtcaatgtaaactggcacaacttctctccatccgaacaatttgatgatggcttttattggttgaacttgaaaggagtcttcgtacgtagcacgtaagaagtatggactacgaagggaagtaagaattgggcttgttgcagaataggaaacaataggaacccgggacttttggccaatctcgatcaggaagtgagcttgcatagatgtccatggccccaaaatagccttcacttgtttgttctttatcaggtcaagagctgtgacaatgccaaaaacattaaaaaaaatcatatttattttgtttgaagtaaaactatctttggaagtaagtagaaacatttttagttggagaaaataattatttatatattctaattaactctaattatattgtagtatttattatactaggaatgttcaatgggattgccaatcaccaaaagttttgcaaagtaatcattttttacacatttgcaaaataatcatcactataattcttgtcaaatccaataaaaaaaagtttcacaattcttgtcttctgaaaataactgtcattttatttacatctatttacaaatatactatatattttaccattaattatatgtatagtaaaataatcatgagagttcataagatatattacattatgtatcctaaccagggtcggtgtattacattatgaaacaaatgttcttatgtccaaaactttatttgggcaaatttaagggtccaaatgcttttcttatatataattatgtttttgtttttgtaattatgttgttaaaagggcccaaatttttatatatcaatttctttttaacatatatatagatatatggttatttaaaacaaaaaaatagtattgacaaaggccaatttttaaatttgtacaggatccgaaccagtcctgatccaaataaaatatatattatattatatatatatatatgagaaagcaagaggctggagaggagaagttaaaaaacctgcaatcgcggcacctacaacgtcacttttggagtcacctacgttgacaacaagccttgtctcaaactggggattggaagagtagaaatcactaatagacatgttgatgcagagcatgacaaccttcgagtgtgaagtatcgacatctgttacaacaccgacatcgactagggttttgccgttgttctgtcctctgttgaattccaaacagaagaagaagacgagcaagatgcagaagaaaagcttttcggtcctcatttggagatttttctttcttcttttaggtgataagtgatagatgatgcttattggtttaaataatgcacacatatatagcaaaattttagatagttgctgaattttttaatatctcatcctaataagcaatgaaacattgtgaagataagaagcaaatacgatttcaaagttcgcggcaatgtttaatacagatatttctgtatttagatggttttgtgccatcgtgtgcatgtagtttaatcaaaaataaagaaggtttcgtgttttgtaggaaaggacttagcattatatattgcaagaaaataatgttttgtatacacttgacacaaaaaaataaacataaaatacagtacagcttgattgaaagtaacagaaaaataaactttattatctttctacaatttacttgtaattttcttattgcaactatagtttacttgtattgtgtatctaaagttatgacattttcatttctatgaaagtcgagcaataaattattattcagtcggagagttatgttaggacttagaagtaatccaaagactgggcaattaataaatttaacatgaaaataatcatggtaaaacacaatcaggagtgtaataaaacgttgactgattaagtaacaaaaacgaagtaaaaaatcttgtgactttgattgatctcagaaacagaggaaaagaaaagtaaaacaaagaacatgtcaacagcttttacagttcgacaccgagccactttgtgcagttatcaaactcaatgtagtcactatctgatatcatagtctggaccacgcttttcgtgctgatttgattttcaatgcctcttcctcaatacgcaaggactaaggagaatatcaatgaccatttcaaaaccctcgccctcagagttcaaatcaactcttagaatgttattaattatagatatcttcctcgtacttttaatactcgagcagattgtttagctaaaaaaactcgggctcgaaataatattttctcccatgtatgcacatcagttcctgaatgactctttctagcggagaatttcttcccgataagttaatataaatagtgtttgttgaaagaaaaaagaatgttattaatctattgtatatttatatgtgattgaaaaaacagttcgaagataatagttatattgtgtcttagtttcgacttttgcaaaattaattgtatgtattttctgaaacttgaggttaaagttgtaaaagataacaattcgtttttgcagaaaagcatttgaactaagacaaataattttctctcaattctttttattgtgataggtgacatccaactcagcacaaacgagacatatggcatccgactcaattgaaattccacacatgtcatcttactcaacataaactaacagttgttgagtaacattattgtgatcaatgttgattccggctaaagcctggaaatttatggaaattatttaaaacttttgttggtgtataaaaacgcaccacattttttgtttaggttaatattttttgtactctatatcgaagataagtcaatatgcttactataaatctttagaaaatgcgagaaatcctagccctaggtttactgtcttgggggaacaagtaacataatcaacctcctgatatataagaatgtggatagtccttacatgaaaattgttgctttcatcgtttacgaaaaattgattttaaaaataactaaataaacaacattagttttcgaacaaatgaaaaagaaaacactacagtagttttgtttgataaaaacacacgcctctttgttagttaaattaaagagtcttgagacattcaaacattatagttgttcccttgggtcttgatgaatatcatcagcgggtgggtttacaacatcttcaacaggcgcttcttcgttcaacaaacaccaaatacaacccattaattatgattctgaaattaacaccaaatactaagtttggatatgtaattcaaatttttttatagttcaggttgaaaaatatactcagcatatagtacaagtatgaaaataccattttccccacatgtaagaacccatagccttaggtttactgtcttgcataacacgtaacgaaaatcaaccactatagtaacttgatagtctcttatacattatatggatcacctatttctgaaaatcgttatttacacaataaagtacaatagtttggtttaataaaaacagacgcccttctatgtttttttaaattaaagacagtctgggtctgtttggtttacttgcacgatattcctaactcttaactccataccgtagtttgtctggtttgttgctttattgctgttttcaggcatctcttgagaacacaagcatttctctatgtcgttgatgtacgagtcggtgtctcgttttagaaactctttccacaaatctttcccttttgtcttccataggaaacagaatgtgaattttccgagtgctagaacgcagacaacaaacacaacaagaaacaaaaaccagaaactgcctacgccgagctgtatagcggtaacagttggatttgaatctggattggtaactggatcaggacaactttgttctttcttcttgaaccaagcgtgctcgagctccactgcctttggagactctgctacttttaagatggcccttgaaacatcggccaccagaggtgatccgattggaaacacaaagccgaatccatcaacattgaagggttcttcaaccattttataagtgttgcaatattgtccaagaaagagtctcacgtaaggtgttcccaagaaagctgcagccacaccaccattttttggtccttttttcagaagctcatcgcattcttctgcggtatcaaagggcacaaggctagattgtgggaaacctgtttcgttaagctttccaaggatgaaggatgttctctgataacccactgtttctcctctatgaagcaagctactcatgctggttatggttggatttagttgttgtgatgtcaaaagcgacgccaaactggctgtgtaactctgagttaacacgagaaggacgaagtaccatgtgacaacaagggaccttgccccgaagctaagcactctttctcctgctgacagcaactcaagagtaagaatcaaacaaagtaatataaacatatataagatgacatgtaaaaggtggagattgaatgtacttggagcaaaaaccatggtagagaaggcaaaccagaagatggtactagcttggtaattagctggtccacggaagtccgaattgaccctatgttcaagagtccatacactaattccaactaggaagaaaaagactaaggttgtcaaccatagttcgattgacaaaggtttcaagaagctgaatttgtctcttttcacttcatctttcaatgggacgatcaatcccacacctgatttcatgaatgggagtgtaaagtcaacaaaagaggacctgttcgccagtatggttgtatctccgaccacggcatcaaattgcttagatggaaaagaaaacaaaagtaattcactaaaatggttttgctaatgctatttttgagggatgattactgtgtgatcgtactcaccccgaggtacacttggtggaccaagtcgttgtgattaccggctggttcaccgttgggtttttcaaaaggaaagaactcataagagacgtcataaggcattgcttgaatcacagcctcaaaaaaatctatgcaaaaacctttgactaccgttgaattggtgataggatcccttgtgaccttcacgagatcagtgaaaccgattctcttgggaactccaatgcgcaacttcttcccattagtcgggatctcccatcctttcggaacagaaacggcctctccaggccatattatatgtttaagatgatctggccaagtggataaagtacctatgcttcgaggttcttggtcaagtttcttcacaagaccatttccttccgtccaaaatcctattgacctttctccggttccaatcatattgacaatctcaaacaccgatggttgcagttgcccgctgacaaaatggaagtctcctgcaagacctttgaactgaactgttgagaccgtctggagaagctttggaccaaattgtgataaaccaagaccatcaagttcagaaacattcttccccgtatccacattactgaaagtcatgttatttattcccgcatcttcaatggccatggccagtgcagtggtcgcatcataagcccacaatccatagacattcagctccatctgtgggaatctcctcttccaacgtgatctaaacgtttctagatctttggattttggaatataagttttaatacccaataccccctccatagcctcaatacccgtctcatttatcgaccgtaagccatccataactccatttgtaaggatccagacatatcctggtttcatcaaaccaagctcctttgctttaatgaagactgttgaggctagagaagaggacatgtggacaatgaacactcttgtgggcatgttcatcatcttaagaagctccacagagatatcttgatccgtggcattgagagggataacggatctataaggtatccgaacattaatatcttgtaatgaatcagtgagacgaggcattataccttctccaaaagtgttgtcgatgtaaactggcacaacttctctccacccaaacaacttgataatagcttttatagcatgcacttgagaggagtcctcatatgtagctcggaagaagtatggactgcggagagaagtaagagatgggcttgttgcagaataggaaacaacaggaacccgagatttttggccaatctcgatcaagaaatgagcttgcatagatgtccatggccccaaaatagctttcacttgcttgttctttatcagatcaatagctatgacaatgtcaaaaccaagaaaattcgggttgagtatgtcaaacgtgaacatagtttacatatagtaacattaacatacatgtatagagagaaagcgaaacgagaaaagaaggtacctgcagttgcggcacctacaacgtcatttttggagtcaccaacgttgacgacaagccttgtctgaaactggggacgagaagagtagaaatcggcaagagacatattgatgcagagcatggcaacatccgggtatgaagtaccgacatctgatacaacaccgatgttgacttgggttttgccgttgtcctgtcctctgctgctttccaaacagaagaagaagaacaagaacaagaagcggaagaaaagctttgaatttttcatttggggatttttctctttttattttaggtgataattgatagaagcttgcttattggtttgtgtttgcagtcttcacacacacatatatatatatataccaaagttttggatagttgttgaatcttttaatatctcatcctagtaagcagtgaaacaacatataaagatagaagccaatacatttcaaagttcgcagcaatttctaaaacaaatatttttctgtatcaaggggtttcgtgatatttgtaggagatgacttagatatattgtaagaaaataatgttatacgtatgacgtaggacatatgacgaaaagttaaaacaatatatagaattcaagttgattgaaagtaaactaaaaacatactttattgtgtttatacagtttactttttattttcttattgcaagaatagttaacttgtgttgagcaactaaaagaatgacctttcatatctatgaaagtcagcaattaaatttcagtggtagagttatgttggaagtaatctaagactgggcaattaattgaatttaaaatgaaaataatcttggtaaaacgtcgactgatgaagcagcaaatcttgtgactttgatctcaagaaacaaaataaataaaaaaaataaaacatcgtctaagggttgcagattttactgttcgacaccgagccactttgtgaagttatcaaagtcagtgtagtctcactatctgatatcatagtctggtaccatgcttttcctgctgctttgatcttcattgccttctcctacaataaacaatgagattaagaagaataatatcactcacgcaagccagatcaaagattctaatttctaaactcatcaagtctaaacaatccctacgaaacccattatcaacaaaagaaggcaaataattgttgatcagatagttccactaaagatgattcaatcatagaaagaattcaaatatctttgaaatgggtttcctcttcctctcgagcttctcctttttcgacttaactctctgagcttcagccaacaaagacatcctcctcacagtcttagcataagggttaagcttcaacatcacattcaaattcttaagaggattcttcttcaacacagcactcttcacatctttctcaatcggtctaaccacactctgaacctcatcagaattaataatcctagccaaatcagcattcattttacctagaccagatctaatcccaaaaaaattgtaattagctcattaataatatttctagatgtgggtggaaatcaagataataagaaaatatggtaagaattgtgtgttttcatgttgtagggtcttaaaaggaattatcattcacactgttgtattatgagttattttccgaaaatatacaaaaattagcttatataaagaaaacaaaagagagccgagtcgaggtcaagaaaaacatctaagttagtaattttagagttggatccttttcaccccgagagaatcaaagcaaaagaaaattcaaaggttctcaaaacataaaacatgatgaatagcgcatagcaaaaaaataagagattgtacatggattaattggggaatagttttaggacaataagattgaaatcacaatctaaattttaaaaatagtcaaaatatacatacaacaaaaataaaatattaatgttattttatggaataaaattaaaaatcttatattttgaaagagtgaatacatttttggttgggaaaaatgttttaaaaatcgcgaattttcaaattcgggacggaaaaagcatgaactttcgatctgtcatcaaaaacccaaaatttggtttgattttctactaaaatagttaagtgtcgttgaccagaacatttttcggaaagttatctctctcatcttttagttagcaaaaatgtttcagcattgtctaaaatgatttagtcaacaaaacttaaccattttattattaagtcaaaccaaactttggaatttaaatgatatttcgaaagtttatgttaattccgtcccaaatttgatattttgcaattgtttctacatttttcccatttttttattttaatacttcagtattacacaattggataatttattaaaagcccaatagaaaatgacatgagagttaccctccatactttattaaaagcccaatacaaaatgaagcccaatagatctccatctcgaccagattccatgcttgaggcaagaaaaatattttgttctcttctatcatttccgttttgacaaagaagtgacggagaggacgacgatttcgacacttctgttctctgcagctattagggttctaaacttgtaattcaaagtttaggtacataatcttcttcccccttttggtaccaaattagatattctttgtgattcgattctctgtttcctatatctgttagcaaatcttgttcttgtagtcggtctttgtttatgaattctggaaaagaaaaccagttttagattagtaaattgttcatcggtgttgttatgcttttactttttttctttgttcgtgtttgtttacattttactaaaccctaaaaagcttaaatttttcttacagattttaggaaattgcagcaatcagcaaaacatggcaccgagaaagaagacatcatctatgatttgggtatatactctttctctccttttggtacaaaaatgacttactcgtgtgtatggaaatggttgttctcatgaactctccaaaccttatcgggctgtgttcttgatagtacaaggtcatgtgttttccgatattcaatctgcagcagatgcgcaatggcctctcattggtggtgttccaagccacctcgatggctagactgtacattgcaagatagtaagtcatgtttatctcttattaatgccttggagccaaagttgagccacacacgagatgaagtcagcttcaggtattatttttcagcataatacaagtagaaccatttttgatatggctagtgtagtgcaagtctactgtaacctttttgttggggattgtgcttcattatcaatactttattggcacatattgttaaatgaaagaagacacaaattctttcttctttgacaatttctatccaacttggttaactacaacgataccgttgattttaaaaccttaagcacatgaaaccctccatttcaagccagaagctctccctcacttcgagctagaaaaccttttgtgtctctgtcacttttagggttctaaacttgtaatcttctttccctttttggtacgaaattgaaataatatatttgcttttcgaattttggaattgatttcagttctttcaatcaaatatctgttggcaaatcttgttcttaatagttaattttctctgttcatgtttgtttactgtttactaaagcttaaatatttctctcttttttttatactatttactgtattctcatttgcttcattgaaggtgattgtttaatttactcaattacataatagatgagtatcacttaaagcttctggaactttgatctatgtagtgttgttatttggtagatagagtgaattgttcctctctaccgaatctatcggtttaatttagctatgatttaggtcttataatataatgtaagcccaactgaaaagtatgattcaaagttctacaactttattaatgttttaagaaacaaaaatacaacaacaaaaacaaaaacaaacaccacggaagctaaaataaaataaaaacacaaatgatataaagtccaacaaaaacaaaagaaacattttttttttttttttttttttgtcaactaaacaaaagaaacaaagaagctaaaaaagcaaacaaacgaaaacacaaattataaaaaagtccaaatcagccaaaagagccacgacatttgactgaaccacagagacaaatcttctttcctttataaattacttcgtcttctccagtcttctccacacaagaaattccatagtcatatgttaactctgtcattggaggaatgtgcttcatcgcaaaaagtccaatgcgaacatatatgtgaccgttgttatcatcatactctataggctgccagaaaacattaggccaacagttgtggttcatgaaccgaccaacatttcctttctccttggcgcttatcaagacttgcgttggaagattagcatcttcagagacttgttcgcaagcatcttcacacaaaagctccggttcatagttccatctgaagctatgataaatccgagatgtatcgaacaagtagtcgtcatcttcttctacttcttctttcgtcttgctcacaccagtaaactcgcagataaaagttccagctcggattggatcccaagaacgtaaaccccaaccacagtttgatgtcttaaacacttccaagtggagcttcaaaccggtttcaaccattcgggttggacaagatccaccacactcgtaaatcaatggtttacgacaaaccaaaatgttgtcatggtatggtaactgaccacagttttttagaatgcatgtgcagttttgatgaatgtatgactgaacaagtgattgactatcaacattaacatcattcgtcatacctgagtaacactgagatctaatgtagtcaaaatcgtcaggaatcgttttgtcttcttcatcgacttcattaacgagcggaactcgtaaaccctcttctccaaaagaaagatctccaagtataaaaccttgtcttggatcaatcaattcatgattcctcaaattttcaactaatttccagattgcataaccaggaggttggcctggtttcctcagcagtttgaacctatactccttgaaaccggattttcctgtcacttgccagcaatcagagaccagataaagtccatcatagatatataccttctcattattatagagctcccctcttatgactcttacttcattccttcttcttacacttgcttctagtgcacggtttcctctttgtaaaacttgatcacatggtttaccaccatgtccgctatagatcaacgtttcaagatcctcggtttcattgtcgtactttcctgatgttaccacactcgtagcagcaggaccatccactccactctctttagccaatagactatcaatgcctccagccgtgtttctgtgaagcccgactaaacacatttcacaccagtaatagaatatatcacctacttgtactccgggaatgggtccaattctcctcgtcatgtttgtccggacccccaaattcatgcaattagttgacgctgtaaggatcttgtctttccggtagtttagttggcataaccgccgtctaaccgcgtcaaaccgcatcaaaatcgaatcaactatctcctggtttccgctttctctctctgcttcggttatccttgaatcaaaatccggacaagagataaccattttgctattaggatcatctgcttttggcttctttggctttctcgacctgttttttaaaccctttggtcggccacatcttcgttttcctagaccagaactaggaccagcactcgcatcagtagagttgttgtcatatgcttttggcttttttggctttctcgacccatttttcgaaccctttggtcggccacgtcctcgctttcctggaccagtactaggaccagcactcgcatcataaggttggttgttgaattgatcaaatggtcttctgttttgtagtggtgagaccattacatgaggaggtgctgatgttgcgtgggcgtcttcattgacttcatgagatgcttctcggtctattggactagtactaggaccggcatctcggtcataagagtcctcaatgttgaagttatctaatagccaaagggtttgtggcggtgcatgaggaggtattgatgttgcgtgggcttcttcattaacagcatctgatctttctctgtggactggaccagtactaggaccagcatctcggtcataagagtcctcaatgttgaagttatctaatagccaaagggtttgtggcggtgcatgaggaggtactgatgttgcgtgggcttcttcattaacagcatcagatttttctcggtggactaaaccagtactaggaccagcatctccatcatcaaatagcattaatagggttggaggtgttgagaccattactgtagttaatattgtctactaaatcttgttgtaactggtgttgactcaatcagaatagacttatcggttgcaaaagaaatcctatcattataaaaagaaaagtcagatatcaatcataattaaacaagaagatatttaaaaactattttgtgataattaacattgtgacaatattcaaacaacatattattataaaattgcataacaatatattcagatctaaattacttgaaacattagtcaagcaatttacgcaaaaataaataaataacatatatatatatatatatacacatatatatacctcaacacgaacgatacataaagcaataacatattgaaacaacgaatcaagcatataccttaaaactgaaattcaataaagaagacggatcgaaggagaagagaaaattggaagcaagaaagaaaggattctatgatattgtagagtgaaggttatcaatgaactagtaaaacttataatggattctcatattgtagggtgaagaaaaccggaaaaacaatcctctatttaaaggaaattaggatgacgtgtagttgtatacaagaaaagtgatggccgttagattcatctctaccgtccagttttaaatcattaaaaaatcttagattttcttccttctaatattcaatgtatcttagtctacacattaatggtttaaaactcctaccatataaatgtgaaatatatttactctctcatttccaatatttctatatatacgtagtttattcaactctctttaaaaagtaaatagttttacataaagtattaagtattaaacgctatgattaaattttgaatatgacttcaaaagtttgtttttaagaaagatatatctttgtagaaagatttgactaattttttagtaagtatcacaccctataattaaattattatggaaagatttgacaaaattttaattaaatatgattaaaaactttaaaatttgcaaattaaaaatctagtcagcattaatcggtcaaatcggcaggtttagtatatgtatttttttaatataaatatgacattgttttgaataagtgaaaaaattaagtaaaaacaaaataaaaagtatttgattactaacttgtaaattatgaattaactattcataaattttcagttattgagattgacttaatttagttttcatataaattaagtgtgaatatatatatatatatatatatatatattataaattcaaatatgtaacgtttttaacatttcatctatttttaactaagattttgttataaaattatgaaaatatttaataaattagtaaataatgtgctaacacctaggttccgcctatccccccgattaatcgatctaggcgctaggcccctatcgaacgcctagctaccgcctagcaattttttgaacattgcttttatgtcttaatttttttttgttataatcaatatctttgtagagtcaattaataacaaccaaaaaataaatattataactagaaaacaacacaaaagggtaaaagcccaaatgttacatcgatcctcgtgcttctttctttgttgaaggcgattcttagatctactatttccgcctctatttgagctttgtcaaaggtttgtatcttcttgtttgtgatctaggagggaggatttctcaatcaatgtcgtcgaagttttggtttgacggaagaggagaattgaagttgtggttcactgtcaaggatgtcatggaatgcttcaaagatcctcaaggctcatcagttcttcttgtttgcactaactatggcagaagtctgtggaaataaggtgggttttcacttgtttgatgtggtggttaacgacaattctttgagatctgcttggctgacacgaagctcgtcttcaaagctgattagtgagccaccaccctctggatccttcgcgtttggtatccaccgatccggttgaagtgtccatgcttggtcaaatcaaagatatctggaaaggtgaagaaagggatatacatgagtgtgtcgggttgctaggtcgggccgtcccagtagatcgactatcgaggtgattaactttccagaagataaccggtggatcaagtacgtcagaggaaagcgatcagtgtcggaaacctactcttccgcccgatctaaggctcatgccaccttgccatcgaccatcaatagaattcgatcaatttttccgattttggaagtttctacaattgggctttttgtaactggatcactatttgtaaagctaaatcgagcccatttttgagaaaatttttaagaataattatttcttttaaaaaataacaaaatgttttcgagtgagtaatattagaaataaactttaccatgaattaatgctaactaaaaaaattagtataagtcatatttcactattttttttagatgtttatatttacctagaattttattttaagtattaaattattattttaacgaattctgttgactctgtcctaattcgggataaaacatttattaatttttgatgattattaatttatagagtttttcttgtgtaacattaaagtaaaatttcttcatctttgtttttcaaattaattttaggtatgcaaattatatgtaatatgattgttctttttttaattaaatatatatatcccaaatgggctaagccttgaccatacaaagagtatctcagttacaaaattacaaacacctaatcaggctcaaacatgagagacagagcatctcagttacaacattacaaacacagaatcaagcccaaacatgagagacagatcttgtcctgctgaaaggccggtaacagtatctcgagcattaatccagcgaaagcaagcaccacgattttgtggtggtttaaagattggaagctatcttctaacgttgagtatttaatatcacactcatatctttaaaatgaaatcaattaaggccctgtttgtttcatcatttagtattttcattcaaatgatccatttacatgattcatttgaatgatgcatttgaatgatatttgtagtgtttgtttgatcatttgatatttaatttaaatgatgcacttaaatggatctttatttgtttgatcattttgtagtttattcacattctcatttagattaaaaaatgaataaaatacccatatttttattttgacatgctttcattttaacaaatgacaaataattttgcttttgccgttttagtgggtaaaaatagttttacggttttggcgaaaaaaatattttacggttttaacgggaaaacatgatattatggttttggcggaaaaacatgattttgcggttttggtgggtaaacatgatattacggtttttggcgggaaaacatgattttgaatttttggcgggaaaacatgattttacggttttggcgggaaaacatgattttgcagttttggcgagattttagaggaaacatgattctacggttttggcgggaaacatgattttgcggttttagtgaaaaaatatgattttgaggttttggaggaaaaatatgatttggcggttttcgaggaaaaatatgattttagggtgtcggcggaaaaatatgattttgcggttttggcgaaaaaatgaatgcaattttgacgtaaaataatagtcccgtgatttctcaatttttatttttattttggtgtaatatgtaatataaaaaaatattaaataaaaaatttatagaaaattagtattattacaaaggttatatttgtcatttattatttttgactaaaccatctccatccaaatggtcaaaccaagttcatccaaatgagttttaaaattttgcctaaacttacaaagtcattcagatggatcatccaagtgattcatccaaatggtatgttaaattatcaaaaacaaacatcatttttcatctccatctagatggataaacaaatagggactaagtaaagcagactaaccatagataaactttgatattccattatcttatatttgcaatttaaaagtttggcaagatccaactgcctatgatgagtttacgaatataaactttgataaagaaaaataatattttgctacaaaagattgaacttaactttctacacactaatatttggttgattcatttcttctaacatgaatgaatcgctcttcatcaccttatgaattatgatgcactagttggtggaagatgacctcaacttttggagattctcaagagagtatcgtgtgatgattcgtaacaaatctcctccggtggtggcttttcaggttgagcgttaagccgtaaaatcttactttggatacgtgagacatttgttggttatgtttttattagatcaaaacaaaaattgttcttttaggtaaagattagaacactcgtatttcagtcttaaatctttgttgccaattgaaaacaaattgttgtattttctcttatacttgtccttgctatcctctgatggtggctcttcggattgagtgttaagctgtaaactctttctttggagtttggggacctaagtaagacatctactcttattttcttttctttttttttttggatcgaaaagaaaagttttcatatacaacccagaatggatatcaattttgggtgtttcgagtttatcatttgttgatgcacaacagactttagcaaatctttaaccataagattacaaattaccttgtttgatgttgaaaatatattgaaaataaaagttaaaaaccagagccacatcggttagttagaatgttagatttcacaaattatagttacgtttctttcacagccacttggtaaatctttctctactctgtatctgcccctctgagaagctcattgagaataatgcttctggttttgtatttgcatgttgcttcagacaattcctttagccttcttctttgagaatatataaggaagaaatgagcagaagacggcagagttaaggtcagatgcatccaagaaaacctggaaagtgaaaatagatggccagagacttaccaacggttggaaagagtttgctctcgcacatgatgttcgactaggcgacatcattgttttcagacaagagagtggcatgactttccacgttacaatgttaggacctagttgttgtgattcaatatgtgtcgtctttagacaaccagaacaacctcggtgagttgtgttctttcgtctctctaacttatattaaaaagagaatacgtaagaaaagagagaatctgtttaactaatactagttggatttaagtctcttctttttcagggaagattcaaaggaaaaagaaagaagcagagtcttcactagatctctcttgttttgtggctaatgtcacgccttcgaatctacgttatgactcactggtatctctacttctaatttttactctaaagaaactcttatactagggtctaaattagatcaaaatcatgtttattgttgtgaatttccagaatcttccattgagttttgtgaggcaaatggtctagacaaaaggtgtggagagatgattctgatcaacgaaaaaggcagatcatggactgtagacttgaaacgaaagaactcatgtccaactacttacatcaaacgaggatggggaagtttctgtaatgccaatggatttagagctggaagtttctttagtttcaaactgttccaaagaggtggaactccaggtttacgttcatcccacagagaggtagaagaagaagctattacaatagagtatctttccacagaacctgaccgtaaccaagacgagagaagctcacagatatggaaagtttcttcttcaccatctcaaaaccgttttatgacagtaactcttaaaccaattaatcactctcaaattgtttccatataagtgtcaaattattagcaacctttttgaaagtttctataaaaacctatttacaaatttttattaggcctaaactgtgtagtagatctcaaaggtatataataaaggattttgtgcaaaaaaaaactcaactttataatattttttttttttttggtaaaaacaaatcaaatttccaaattcatagttaagttagcaaatatggagaaaaagagttcgtatgttttcagttgcaagttctgctatgtttgttaatcttagggtttaaggtataggagtagatttggttcatagatcttcctttcacaatgcaatatcaaatatatagagtgatggtttggtcaaatatcaatgagctcggtttagttatttgactaaaccatatatttgactatggtttcggtttagacgtttagttaaacttattagatgttggtttagttggtacaatgcagttattgtataaacaaagtcgtctcctggtgaccatttgccaacctcttgaatgattctatataagattaagtcagatctgcgttacacacacatgtttacgaactacgaagttaactagtagtatttaattaatctattagaatgttcaacccaataaatagtttcgatttaaacccaaataactaatatgaaaacaaaccaaatttttcatatgattaaaatgaatgtacaattaccaaaacgttcaaaattactgaatcagatacgtgcaaaaaaaaaaaactttagatgaagtaataatgaattgagacttatatttctttgaaaaaaatagatacatttgattaaaaaccgaatccataccaaaatcaaaacaaaaccaaacctagccattgtagattcctatttacattcaaaaaccaaaaatcagaaatccagatgcatatccttattattttctaatcatatttgatgtttaatatatatatatatatatatatatatatattgatatatacatgattacatgaacctaacaaaaacctaaaagagttttctttttagaatttatctaaaataaaagaatgtacaagatggtctacagaattgactatcagtttagttccgaatataaaatcaaagcttttgttgaacaggttattatataaaactccgtacgtaccaacgaatagtctatcaattctcatactttaaacacatttcaacgaaactataagaagaagccaaaacttttaatactttttggtatacgaagaaaaaaatgattgatagaaacaagaggcttttattcttcttctacgtcttgttcttggtggaactcagcaaaggacagagcagtagaataactgaagttaatatgggagttgtaacagatgtcgggacaatgcactcggacattgaaatgttctgcattaatttggctcttgccgatttttactcttctcgtccccaatttcagacaaggcttgttcctgacattgcggactccagaaacgacgtagttggtgcagccgctgcaggtacctaatcaaaatccatccattgtttgtcaataacatgcatattacctaagtttaaattggggtggtggcataacgatgatgcttttcttgatttgagaaaaaaaaaaattatacccttttgtttgtttagaaatctgcattatgaaaataattaggcttctctttcaccatcttaaaaaggtcatctctcaaaatatgaggaacaatgtctttctactcctacatacatactttaagaaaaaacatttggtgtcaaaacatacttttaaattttgtttataaatagctggaaatcattgtgaattgtttaattggtgaaacgatacttaattagttagatctaaaatagcataagaaaatgttttgacgaattagttgttttgatttttcatgcacgtagaacgttgacgagacaaagccggtgggttttatgtactttttaaaacccatgactacttgactacctttttattttgggtcaacgattaaaattgtaaactagactaaaggtatggttgcccaaactagaaatgtaaaatttataaacaaaacaatactggaaccattcttagctctgtaacccaagctatcggcgttacaatttaaacgggtgaaagaaaagatacgggaaataaaactaaactttcctcctataaaacgaaagaactcttcaaagtgtgtcgcgaaggtgagggtggccactttgaaagtgtcgacacaaacttacaagttttggaattctcatcaatagaattgagggcaaataccaaaggcacaattgacaatataaatattagccaaataaatatggggaatagacgttgcaaaaaaaaaagaaaaaatcgatgattttaataattgtatagaatatataaagctatagtcgaatctttataacccgggttcgaatcttttagagcatcattataggtagtattttagattagtcttagcataattcttaggaatatatatatatatatatatatatatatatatatatataattgattttgaaaattttgattgttaagagtttggttaagagattaaaattttggcaatatgcaaaatggtaaattcttaacttggaattcttaagaaaaaaaagaaaaaaaaaatcttaataattattgcaacttataaaatttgaaacatacttgatataaaagtttaaacaaacatgacgtaaacataaacaataacgattacttaaaatattgattcatgccaaaaaaaattcatatatgctcgaccaaatcatatttcaattgttaatgcgctcgtcgatcacgaagttgagttctagtgtccaacatattttcgagttgatatccgaattatttttagtttttgttataattatacaatttttccaaaattaaaccaaattttagtaaaattaaataatttttattaaaattgaacaggtttttagtatttttcctcaaaaactgatctgaaaccgatccaaatgtgacaccatccaaaccaaaaccgtaccgaataatcatataatccgaacggataataaactccctaattcgaattatcgaatccaaaataatatgaaccgcatccgatccgaaatccgaatgttgaagcctaggtatcacattgtgtgaaaaagatagaaagaagaaaaaaaaaaaagaaacacccaatcataaaatgacacatgtccgactcttagatcttagtttgactcttatataatataagagccattcataatagggcaatattaattgatatgcctcgaggatgaagaaattaagaatctatgtataaatattagttatttaggtaagtatgaaagataaataatatataaaccaaaaatatcttttaaaaaaaaaatacaaaaatgccattgaataaaaataattgtaatattcagatgatagtatataactatttgtttaacgtgctaaaaactatgatatcgcgatactatgatatcgcgataagtttataaattatttggtaaaacatatttatcgatttaaaattgtaaatcggtattttatatttatgtatattaagcacaataaaagggaattagactttttcttacataattaacatgataataattataacaacatgatatatagaatagtaacatgcaaacatattatacaacggaacaacatgatataaaaagttaagatatttgatatatgaataatatttactacaacggttaatttatacataatatttatcaataatttttacgaggttaacctgataacaatgaaaatatttagtaagaaaaataagatatgagattttaattaaaaaaaagaaaaatacagaaggataataaagtaacttcattagttcttttactgttgaagtagtcaacaattctttcacctaaattttcagtcttctgagcatatcgagtgatattttccttcttaataatataatcaataaaaacattatatttcatatctaattaacataagaactagtctaagataataccaataatgattctcttaagccacatgttcagtttttaatttaaatgacatgggtaaaaacgtaacttctcacatatcttctttttcctccagctaaaccttaactaccgcaatcctctgttttttatttccgtgtttcttggagtgatcttagagcagctccaacgtataggattcatatagtttctaaaaaaacaaaaagtattaatattttactttcatatcaaaaaaacagaaaaatcaacatataggaattgtataaacgatcctaaaattaggaattttagagattctctctcaactttttcttaacatttaaatatttttattttttttaattgtatgagtttctactaagaaactaccgctgcagttggtcttatacctattcttttcctaatacttacttcttcctcatattctagttcattcaaattgttttcaatttctggagagctcgtccttcatctattatatataggatgatttacaaaattatatgcaaactttaaatataatttatattctatatgaaatttttgtattttgtagtctttttttataatcggttgatttttttttaaatggagcattaactaataggtttttatttgaaatgtgactttagtcaaatggttaagtccattcgactccacctcaccggagtttgactccactaagtctcgttatccctcgtattagggattggttacggattggatcttgtcgatctaatgatatatacaaaaaaaatgagaggttttgttaaaaaaattatgcttgattttaactaaaacattttatattttgaacatatggagtatatatatatttaaaaagtttacattattattggcttttctttcttttgaaatcactatcggtttccattatcattattgattttggttgtaggtcttgatctatcttaggtttgtgaaaacctaaattgttttagcctattatcagagtgaattccctaaacttagatattttacagacagtggatacaagattttttgaaatttatattgtaggttgcgcgcgttcattgctataagcttattgaattaattatagttctcaaaatgttattttgtatcatgttttactaaagtcaaacattgttgtttctatattatctcctactcagccaatgttttatttgttttgatgttgtaacagctcttaagctgataaagaacaagcacgtggtagcgattttggggccttggacatccatgcaagctcattttatgattgatattggacaaaaatctcgggtgccgattgtttcttactctgcaacaagtccgtttcttacttctctacgcagtccatactttttccgtgctacatatgaggactcctttcaagtaaaggccataaaatctatcatcaagttgtttgggtggagagaagtcgtgcttgtttacatcgacaactcatttggagaaggtattatgccacatcttactgatgcattacaagagattaacgttcgaatatcatacagatatgttatctctctcaatgccactgattatgaaatctctctagagctttctaagatgatgaccatgcccacaagagtttttatcgtccacatgccctcttctcttgcctcaagagtctttactaaaattaagaagattggtttgatgaaaccaggatatgtttggatccttaccagtggagtaaccgatgagttaagtttggtagatgaggcgggtattgaggctatggaaggggtattgggtgttaaaacttatattcggaaatcaaatgacctcgaaaagtttagagcttgttggaggaagaagttcccagggatggacctgaatgtctatggattgtgggcttatgatgctaccatcgcattggcaatagctattgaagaagctggaacagataacatgacttttagtaatgtggagttcagaaagaatgtgtctgaacttgaagctcttggtttttctcaatacggtccaagacttcgcaagacactcacaacagttcggttgaaaggacttgcaggagatttccgttttgtcgaaggacaactacaaccatgggtgtttgagatagttaatgtgattggaaccagagaaaggtcaataggattttggacggaagaaaatggtcttgtgaagaaattagaccaagagccgcaaaacacgggtgcgttatccacttggcaagatcatcttaagcagataatatggcccggagaggctaactatgttcccaaaggatgggagatcccaacgaacgggaagaggttgcgcattggagttccaaaaagaactggttacaccgatcttgtggaggtcaccatggatcctaccacgaattcacaagaagtcaaaggtttttgcatagctttctttgaagctgtgatccaaaaaatgccttatgacatctcctatgatttctttccttttgaaacatcggacggtaaaccagccggaaatcacaacgatctaatctaccaagtttaccttggggtgagttagaccatccatgcattcccaacacactcccatttagagagattatcctagtgaggtccctaattgaatctccttttacatttttttgtctctatcgcagaattatgacgcggttgtgggagatacgactatattggcaaataggtcctcttatgtcgacttcacattccatttactaaatctggtgtgggattgattgtccccgtagaagaccaagtggcaagagacagtatcagtttcttgaagcccttaacatggaaactttggatgacttcctttttcttcttcttcctcattggttttactgtttgggttattgaacataggattaatccggactttcgcggaccagctaagtaccaagttagtacaatcttctggtttgccttttctaccatggtttttgctccaagtaaattccctttccatatctcaacatatagtgagtgttaaaaaaatacttctttccttaatgcttactctattaatatgcaacttgcaggagaaagagtgttcagctttggagctaggcttctggttatcacatggtactttattgtgctcgtgttgactcaaagttacacagccagcttggcgtcccttttgacatcacgacaacttgatccaaccgtaaccagcatgagaagtttgctcgagaaaggagaaaatgtgggataaccaaggacatcattcatctttggaaaacttaaagaatcaggtttcacttcatccagcctcataccctttgatagcgcggaagattgcgacaagcttttgagaaaaggaccaaagaaaggcggtatctctgcagctttcatggaagtaccctacctgaggctctttcttggacaatactgcaaagattatcaaatggttgaagaaccctttagcgttgatggattcggtttcgtgagttcccataacgaaattgttctaagaatagctctaaaataaatgctaagatcatatgttcgtttttcgcaggtttttccaattgggtcaccactggttgctgatgtatcaagggccatcctaaaagtggcggaatcatccaaagcaaaggatcttgatctcaaatatttcaaaaataaagatgaaacttgcccggatccagtcacaactccagatccaaatccgtcaacatcatctaggcagctcggtgtagacagtttctggcttttgtttgttgttgctttcataatgtgtcttttcaccctcggaaaattcactttcttgttcttcaagaaaaatcaggttgctgatttgtggaaagagtttcatcgaccagatggagattcgtacatcaataacgtggagaaatgttcttgttcgccaacccaacaaacgtctggcaacaatattcaagaaacaaaccaagaggatagtgggaacaacattcaagtaacaaaccaagaggatagtggtaacaacattcaagaaaccaaccaagctgatactgagaacaacattcaagaaacaaaccaagtaaatcattgttaagacacagccaacaaccgacttgataaaagtgtcttttaccttttctattaaacaaaatttaataacatcatactcatttggataacactaagtttagatccaaatatctaatatgtttcagcctcaaactcgtttcttattcgtttggtatgtaccttcagggcctgcttacaggcagtgatggcagtgttagagcaatggatccacattttttcgaatttttctaagtttttaaggtcctaatttgttttattttgtaaacaaaagtccaaaattttaaaacttttcaaacaacgacttaagttttcagaaaataaaaaatttgggcattaggtccaaaacaaatttgagccggccatgtgtaccttgttgttttctgcatacattaaatagtcttcacctttaacgtctcatcacatcatcaaatcaaaggttagtcttaaggtttttcattagatatttgatgttttttcaatgtccaattttttatttaatacgttgacataattcccaaatttttatggttaaaaataattttctttttgagagttttgtttctttttctcatcatataatggttatttataaagtttcatgtttaatgttttctatgtatgcttttctttctgatattgattttaacaaatataatatctaagatctttaataatttttggttgatttcttgcaggaaaataaaattataaaggatcctcttattttgatttgatctcatcttccaagtttttaaaaacatttgagcaattgatgtcaaagtagatacaaaaacagaaaaagtaaactaagaacattgtatgattttattatattatatgcaaataaataagtcaattaatttttataatatttgtattatattatataatacataaatttactataagtaataaatcataggttccaatttaaaacattgaatgaaatagatgattattgtcaatttttttacaattgtcattactatttttatttttcatctttttactattttttggtatttgattaacttatacttctaattatatgtaatagtttggtattttttggttaaagttaaatgaacgttttcaatagattttaatgtaaactttttttgattaggtggctatgtaggaggagagccaaacctctaactatattcataatcactcaaatatatctaatggcttttgactaatttaggttattcgaagtaaattaatataaattatattttataaaagttgcattactgataatgtgctgataacacatgaggtcctacactacataaaaacatcaggagcaaagaagaggtgttatatggctgttaaaactgacatgagcaaagcatataatcgcattgagtgagagtttatcagacttgttatggaaaaaatgagttttcaccaaaaatgggttgagtggataatgcaatgcattacttcagtgtcttactctttcttactaaatggagcagctcaaggttcagtcaaaccacagagaggaataagacaaggggatccactatcaccctatattttcattctatgcagtgaggtcctctctggactttgtcagaaggcacaacagaatggagacttacttggtgtaagagtggcaaaaggcagtccccgattaaaacatctactctttgcagatgacactatgttcttctgtaaattcgatgtccaaagctgtcagaaccttatgctaatccttcaaaagtatgagcgggcatcaggagtctgctattacattttcaaccaagacacacgaaacaacaaaagaactagtaatgcaagctctaggcattcaacaggtgggcggtttaggcaagtatcttggattacctgagctgtttggcagaaagaagaaggatatgtttaatttcatcatcgaccgcataagacagagagctaagagctggtcttctaggtttctctccactgcaggaaaagcaaccatgttaaaagcagtcctagtggcaatgcccacctatacaatgtcatgtttcaagctcccgggttctctctgcaaacgcatccaatcagctctaacacgtttctggtgggactcttccctggaaaaacagaagatgagctggattgcctggtccaagctagctaaaacaaagagagacggtggcattggtttcaaggatatacctagtttcaatgatgctttactagccaaagtgagctggagactactcactaaaccttcatctatgttggcaaaggttctccttggtaaatactgccaatcatcatccttcctagactgcaaagtttccaataatgcatcgcatgggtggcgtggaatatgtcttggaagagatctgcttaagactcagcttggcagagctattggcactggcaaagactctaagatttggcaagaaccatggatctccctttctaaaccagtcaccccaatgggaccagcaactcagttctctcaggaactaacagtggcagaccttatatgtccttcttctaactcctggattaaagagataattcaattgttgttacctgagtatgaagcagagattttggaaatcagaccaagcaagagaggagctcaagatagatacatttggttacttaccaagtccggagaatattctgcaaagacaggctatcttgttgcgaacttgcgggaggagaggccgcttctaaaccctccagttgttgagttcgactggctccgagagatctggaatatcaaaacctctcccaaaattaagttttttctatggaaagctatgaaacaggccctaccaacaggagaaattttgaaatttagaggcatcaatcctacaacagtatgtcctcactgtggagaagatgaaaccgacacgcacctgttttttcattgcagcttcgcaagctcaatttgggacaaatctcccttcaagacttcattctgctcttcccaaatcacgtcgctgaggaaaggtctagaaacttcgaagctcctgaccaatttgcctcctacaggactcggagacgtcccccttttgccatggatactatggacgatttggatctcccgaaataagcgcatctttgagaagagacaaattacaaacttcgaagcggtggctcaggctgtttcccaagctcgggaatggtgtgcttctcaacttgtatcaccccaatctcctcaattacgactcccgtaccagatcgaagagattggattagatacaatccgagggttcacagacgccgcttggaaagctgagacaaaagaggcgggatttggttggcacttctctgatttcctctgtaacacagagcgccatggtagatcttctgcttccaacgttcgatctccgttaatggcagaggcgctggcgatgcttcacgcgatccatcaagccagagatcttggttacaaaaaactttcgcttgcttcagattcgcaacagctgatcaaagcactaaatttggagcttcaatcgaaggagctctacgggattctccacgacatcctctccctatctttaacttttgattttatcagattctgttttgttcctagagataaaaatcgaagagcagatgagattgcaaaagaagctttattttctgcattcaatgtactagtggttataccggttctgatttcaatttaatggaaaaccagctgtttgaaaaaaaaaaaaaaaaaaaaagttgcattatcttatgatattgaaataatgaattttttaaaaaaggtaaatatcatcactaatttttttcatgataaacaaatctcgtatccatttatttttcttttagtgtttactaaattatctctagttattgactagtttaggttatttgacataattatcattaattaatttttctaccaatgtacatatcccactatatataaattatgaattattgagaaggcaaataccatcactctttaaatcatcatgataaactcatctaaaggaaatctcatatccactatgtgctcaaaatttactatctctatagtggtgatatctttcatttgttcagaagctctagaacacgatagagaactgatttcaataacaggacctctcatgacagtctcgatcaaaaatgaaaatgactattattttggagttccattgtaaatttgcagataaagatttcggttttcgccttcttaaaaaaggtgaaatatatgaatgaaaatttcatattaatattacgaaaactacactatatttttgtggatttaatgacggacagatagataaaggtacttttgacatttacatagcgcttagagatgaggaaagatgtaaaatttgtacatgggaagcagtaaaagatggtatttatggatatagcgacaaacatcctcaaccagctttactgttttataagtggttaaaatagtaaacaattaagaaattaagatgtaatgaaattttaaataaaagttcaagttacccattggtttatgctttatagtaagttggggtttttcagttgtctaagagctagaaaatcctacaaatgtctagttgcatgttgaagctctaatccctttcgtcggttaggttaattttgtagatggaggctgataaaaccctatcgtatatcatatccactttaagagtagtaaaaatttgacgataaaccaaaaaaaaaacactctttcctttccacgtcattaccggcgataagtttacctcttactccctccatctcctttctccatggatagtagagccccctcctctcggttcctctgtatccatcgctagattcctcgatctcgtctgcggtggttgatactcagccaaagataggaaggtgtgggaatagtttctaccaaatgttgtcttgggtggtctctgcctataattttttttcttcagaggtaacatgagttagatcctagacttagaaatttagcaagtgggatattgtgtgttcacattctccaaatggtcaccaactgctaatctctcttttccagagttaatatatgttccaatttggatcatcttaagatcgtggcatagtgtccatgcaatctctactaacttttcaaaaatcttagaaatatccctaacctccacttatgttcatagtagaggttgagatcattaaggtcactcaaaaggtcattaatcaacgctccaaatctccatagcctctagatttaagtttgatgtttgttaaagttcgtaaacatgaagcattgtcagcaactcttacttaatactcctaatacattagtggaggattttgggtgtttgtctgcttctaaaacaactcttttaggtgctaggaaaactgtcaaattcacgagtaatctccattctttcttttttgacatctcaaaaagtattcattcaataaggcttagagccttctcaatcaccatttttccccatgatgattttttgctggcatgtaagaggcaaaaatggacacaaaaaatacagagtattctctggttagattaccgctattcattagtcgtcttttgtaaacacatatcaaacatacaaaaaatctcagtcgtactatcatgcagtggagttatatggaatttaccgaacttcgctagcaatggtagaactttggttggttagaaaatcatctcctagtggtaacttacgagaagatagaccaacaaatgctttccggagttctaaacccggcattaagtcacactttcacgataccgttaatgtactcaaaatttaatcacactatggagatccatttggaaagttttttcaaaattaggtgtgaattatctaatgaatactcctaggtagtgttaactaggtttctatacgcaatagaacacttctatgttactcttgatttcttgtcaaccaaaggaattgcaaaaattccgaacttcctttcttcaaatgaccttgcttattatcgtggagccttttataagtagtaatctaaccactcataagctaagcattgcttatagtaacgaagcttggtaagattcatttccagattcaatagtagtatttgaagtaatgttaggtcagattattctccgtgattagtctttaaatctgagttgataatcaaaagaataaaacattttgtgccgtgatatacattgttatatagacaagctagcagatctttacattaaacgacttctacattaaggaaaacaataatgactgagcagatcttctggagtgattgttgatatgtcgtgatttccttgttactcaaacagcttcatgaccaagtctcctttaaccatgtcaaaccattggttaacccaaaccaaccttcaataatttacacaatacaaacaatatatttccactacccaaccatctcttggtctatggacccacccttttcggttagctggtacgctacttgggaaagctcgaaagacttgttttctatctatacaaatcaccgtaagatctttcaatgtgttttgttctcactcgctttagaatttagttaaatcaatttcagatttttaatctaacaattcatattaaacatatcgagattgacagtaattttcttcataggccataccgccagtcaacacgtttctactcataagtaattggtagacatatatattttctatgacgcttgggcataataaacttgtaagcaagtttgatttgttattaatcaagttaaacatgtgtgatctgtacagctacaacatgatagggccattggggcatattattttcatatatgtataccatcttaatcatgcttgctagatttgtttatcatcataatttataagactttaggtttaggtagagtcggccctgagatatttaacgccacaaacaaaaacaaatgaagacttattaataaaaaaagttttgtgaggaaacaaaatagagaaaattgaaaataaaagatgttcaaaattagataaaatgtcatttaaatcttcagtttacaattttcgttcgtttaaagcatgagtctgaatatgctgatttaaaaccttaatttttatgatgactaatcacgaattctcgttaatttagccaattgagacacacaattattatatttcggcttttatgaaccaaaagagagagacaccaagtgacgagcaatgtactttgttgagcaatacatctgtttggtttattatggctatgtaaaacaaggtgtaagaatgtggtaagtgttggtaacgcctcttcttagttttgttaaataatttatgtttaaaaaaaaaaagattctttactaataagaagtttttggctatgttcaagaataatggaatggagggtataatcgagttctttagttttataaaacgtagtacaccaaatctttttagaaaatgtattagatggacgtttttaaacaaaaatctccttttaccaatttctctagaaaaaacaggaaaacactgacggaggtttaaactggtcattgtaaccttaaaggcaaaagtttctactcatatggactaagaagaattttaatataaaagctgccgctaaaatatttgtacttgattagagtcatggttgccccacttggctgcatggccgattctgactttaggttaatatgaatgtctatataccaagaaaactttcatagaattctaggtttctaaacatattttgaaattcagaaacatataaattaataagatttagatttagatatttgttttggcctttataaatgctaaaattgattttcaacgtaggttttaacaagggaaaatcagttttatgaagaaatacaattctaatttctaaaatcattttatgaagaaatacaattagaattgttgagtgcgatgttttcatatcttgaaaaataagtattttatatatatgtatgtcactaaacacccgtgaaacaaaacccaagttgagaatatatgctctatcttcaaatgttttaaaacaattaatgtatttgtccccaattcaaaaaaataacattttttttggtaatgccaatttaaatataactgttattaaaagaaaaagtcttcaaaaaacaacactttcaagttttgttttgccaaaaaaaccactatctgtttaatgttctataaataccaccaatagttttggttttccaaaagtaccataactacaaaaatcaaaaaatttaaattcttaagttagaattgactattttagatttatgttatagtttttaggagataaggtttagtatttaggtttatggtttagttttgaaagttgaaagttttattttatcttttgtggtatttttgaaaaaccaaaacttaaatgttatttgtggaacattaaacaaatgatggtatttttgaaaaaaacaaaacttaagtttgatatttttgagaagagcttttattaaaatgtcaatttttgatattcttggttaatcatagtaaaaactatcactaatgttatcagcataagcaaaaattatttaatatatacttggttaatatgcggatgcactctttcatgattttttctttgttcgcatcccgtgaactatttctaacgcaatttttgaggaacaaaataacttcagaataactttagaaatcaaattataatgcatcggatattgatccatcggaattccatcatatattatttatttgtgcaatttattattaggaataaaagtttgagcatttcaactcaagtggctcatgtcatacaaccgaagcttgcactttgcaaagtggatgtaacgatctattgaattatacatatacagtatgttgtcatcatctatggattgttttatatccatttatatataaatgattgtcgtatgcactagatattgagcatattctttcccaaatgtattttacgtatttacttgcaccttgtattggtttaccttaactttttttttaataaatgaacgtttacggctactatgtttaaaagaatacatgtacacttttaggtaagtaaacaaccatttttcgaaacaaaataacaaaaatgtgcaaatgatgttgtggtgatctacggcggattcaaagctacaccatatattgagccttaaatttaaaagaattggaggatggtaattatgtattttccttctgcttaaaacgactgtgagaattggttcgagagctaaagaattcccccaaatagaaatcactttaggttttgattggtaaagaatgagagtaatagtgtaatagagaagaaaaaggtggaatgaatagttaaaagaataaaacaaaaagaaaaacaaatgaaattaaaaaggagtagtacttaagcctgatttgttagttatacttatagtatgaatgaaagtccaaaaaaattcttagttaagaaaatacaaataattcactacgagatgatagaccgtgcaaaagttgtaccctccacttgaaagcctgaaaggttcaggtggaagctgacgaaacgtgggtcatgaatgaatgtatccaatataatagtgcaaatacatttattatgtttcctcttactcgtaaatgcaaatacaattatatatagttaccaatatatatatatatatatatatatatatatatatatcattggataaacataaactttattactattaaattgcaataacgacgaggtgcttggtgcttttttctgtcaaaaaggtgctttatattctaatacatataaaaaaaaaaggaagtatatattgagggtttttttaatggcaaacgtaattaatttataatagcggtaatgattctcattgtgacaatgtgccaaatcaatttggaccaaagatattgttgagcgaatctaatctttaagttgtgcttagataatataaaatagaattgaatttgtgtaatgacaacgactagtgatttcaaattttctatgttttctttttaatgtaaattttttttctatgttaatcttgtcagagaaaaataaatgaatacgtcccgtcttcgtgtctcactgttgtaagtaattatgacagtacagcaaatcaaactcatagtatcgggatatcggcagttaaaacttaaaatgattcgaaaaatgccaatcgactaatattattaatattaagtttacctattgacatttcttttctcttcaggtggttgacgtattttattttttaacaaattgctcgataaatatatatatatatatatatatatatatatatatatgtatatttgccccttattctaaagaaggcaaatgatacatttcattattattaaacaccattttattaaaatttatagtttatatgaaagaaaaaaaatgtatatatgaccgcactaacaaaatgtaatatatgatgagatttacaggaagaaaaaaaaaagcaaaatatggtgcaaaatgtataaaagaacaaaactaattaagcagaagttagaaatccgatcttaactttaaaaacataacataccaacaagcccaaacaataattctaaacacaatttcatcatacaaatccattataaatgcatctaacctaatgactggaggatcatatacatcaaacctaactgcaaaaatgtatcaaagagaatctgtaaaatgtttaatatgctttaagattgtcgattatataaaagtatatataaagttaaatgtaaatggaagcgctaacacaaacaaacaatggaaaccatgtaaaattttggcaatgatgcatctttcaatagaaataaaatgttcttcaaaagattatgcataaacagtcgaagcatacaaacaacacaagatatttattaatgttatccatatcatatgatgcgaaaacgaaatcaccgaataccagaggagaaagataagcatttagatcacatcaatgcaccaatcgagaaaatggaaaatgaagacaagatgcacaaagaggtttgttgggactttaccccacaatgctcattccctctcgtcctttcccaatcatttctgtctctcttataattgtgcaaacattgtcatttaccaccaaagcaaatgtgctctttcactgtgccttatgtcgcactaatatctttgtgggcctctataatcatcacagattttgcgggaaaaggtaaaaattcttaaaaatatatattgtataaaattaaactgctcttcatcttttgtcaacatatatattaaactacttcgaacactgatatgcattttaaagcattttttagaaagacttgagttaaactagtttatttactgagttaatgtttttggataaatgattcgttcaaaagtgaatatttggaactgatcgatcaaaagttttgttgactagagatagactgagagtaaactacgctatagatattctgtatgcattttttacaaagacttaagataaacttgtttattactgagttaatgttttcgataaataatttctttaaaagtaaatttttgtagttggatcaaaagttttcttgactaaaaaatggaccgagagaaaactacgctataaatttgaaggtttgaactctttatgtttttgacaaaaataagaaccctttatgttcggtaacttcgattagttaactggacttcatttaactagtttaatttcattagtcgatataatttttctgccattttaatggtataaacgcctatgtttcaagggtaacagaaaataagtattaagtttttctcttctttagttcgcaatgtgaatacatagatgattccaaaatatgctttcttatatatttgtaagaatttagtttgaaaaacagacatggtcctttaaaatggaacctgtgaaaaaatataaacttaattcttttaacaaaaagaaaagaaaaagtttataacatttggggcacaaatttgcacctgatcactacattttaatatgatgacagctttatggattattgaggtagtgcacctggtgcacggtagttggtgtgatagtaacaattggaaaaaaaaaaaaaaaaaaatcccacatatgacttttatttgcacttttgaaattttttttctttatttttcttttaaaaatatatttttaatatgtaaaattactaaattaactttcttaaattaataacaattaatcaaaaacatatatattttaatatcaaatcaatttatttgtaataattaaaataattcaaaatatatatttagggtaataaatttttgaatttgttagtcttttataactaacaattccaaatctttattgccctaaatatgtttttctaaacaataatgactaacaatattctaccgatattaagtcatgattttttttaagccatgtgttatggtgcagattttaatattcattattattgtaaaacattaaataatttactttgcaaaaaaaaaaggagaattattgaattcaagcaaagtttggtgatatgttaagttgaaaattgtgtttggactactcgagattattttattttatataagtccgattggtaacacaaaactgtacaaaattttagctgttagctataaccaaaactttttttggaatagtgcaaagttgtacaaaagaattatacgagaaagctgtacagtaaagttaagagtaaaactttttgtaatgtttttgataaagttaatttttgcgaatgataactctcaaaatagtacaagttatatcgctttgagaatgtgttaccatttaaaacctataacatgacaaatattaagtgatagactttataatacttttagatatagaaaaattgagagatagaaaatttcttcatccaaaaagaaagagagaagttggattcccaatttgcgggatcccaaaaaaataaaatccccattaggcatcatagtgtgtcctcacaagaagatagatatcgtgccataaattagaactgagagtaaggggtcttggaatccatctctcactctcattcctctgtcacttccagaaaccaaactattcatctatctaaattgatctatttggcttaaagtatcttagagtcatcaagaggaaaccccttgtctttccaaaaactttctcgatatcatgctatcactgacatattattggatataagacttataagtctaatacccaattattgtagtttgtgtagttgattgatgtcaaagttcatatggtttcaaatttattggtaaatattatgattgatatcctttttttgattttaaaaatcaccatttatatatttttcaacaaccgttaagcaaaaattttaaaccaatctgcggtagttcttgtaggcatttttcaagttttttttagtgtagtttcttaaagatactaaaatttaatttatcgtgtctagtttaaatttgtgtaattaatgttcgctatctttctttaaaaaaacaagcaccttaacatatatatgtgtctataacaaagtaagtttgagtacataatattgcatgcaaatatatgcggcaaaactaaaaagtaataaacggcaaatgaaaaaaaaagctgctttaattcaaataattaaatattcggagtgactcactttctttttccccagggacttcttacctataaatataacacctcaccacacccattgtttcattcatctttccagctttcttcactttttcctttatataaagttagaaaaacaaaaaaaacaaaatagttagaaaaaatctgagagaaacagaagaaacataaaaaaaatgaggccattgagcattaaaccaacatcgttagatgtagctagacatgccacatcagtagaatcatttgggaatcaccgaccgccgatatcgccgtggcactcaccggtgccgtacctattcggtggtcttgcggcgatgttaggcctcatagccttcgctttacttatcctagcctgctcttactggcgcttgtcaacctccggtgatgactccggcgaaagagtcgacgaggaaaaagagagtcggtctggagtgaaggcggctagcgcggcgtgcgaggagaaggttcttgtcataatggccggagatgacttgccgaggtttctggccacgccggcggcgaacaaatgcatgtgcggtcacgagggtagaatggtaattttcaaggaggatggtattggtgctggagaggagaaaatgggagacagagagaaagccaaagaaaatgaagaaacaacgagtcagtgagcttttttgttttcttttcttctctcagtcttgtctttttttttttgttggggaattttccttcgtgttttcacgggaaatgtaaaatttactgagagaaaattttgggttatgattaatgaatgtttgcttgtaatttcctatccccaatggtggaaaactcgtttttagtttttgtaattctcaaaagtgtgataggtaacctttctcatacagctttaataccaatcagtaatagagtaaactaaaacggaataacataatagtacttaaaattcttacaattttatgtcatcactaagatctacaaaaaaatgaatcatagtatcataacactatgtttgcccaaaaaaaaaaaaaaaagtatcataacactattgatcataaattcaaagcttgcaatgtttcgatggaaacgtgattcatcccgtacacaaactgtaattttatatacattttcagaaactaatgtaatgcattaacccttttgtattacgtatatattctcacattttatattttgtaaggagattcgtttagttactttaattatgaattgttataattgtgtctcctccatgtatttgtgttactttcatattttccttgcatttatatattttatttaccataggatagttctgaatttgctatcaacttggatattttaaattaattgagactccatctagttcaccgtcaaattttaactatacttgtttaactatacttgttatataacgagtgaataaactggaaatagtattactattaactatgaacttacattcgtaatattcgaaaatatgtgcgtgagttagtcttgtcacaagaaaaggaatcatattctttttttcattaaacaaaaattggaaacacatattatggtataaatcaaaagataattcgattacttgccccatttgcctgctttactttcaatttgataatatcccatcaacaagagtcttgttacatgaccaaattttcttctgttctcacgttattaagtattttgaagtgaagtgcactccaaacaaacgtctaaaacttaaggtttgtataatcctcaatcaaaaacattttacaacttatttctatttttttatattggggtctttttcccagctactaatatacgatcacttaagtaattttttgtaaaaatcattaaaaatcctaataaactcatttgcgtagttcaattacacacatacatatgtagtaatataaatattattttccgttttaaattatcgtaaatggaatgtcatttagaattttaattttattcaccacaaatgtttttttctgttttaatatatttgtttgttaaaatttatattttcgtcgctaattagtccactgaaattataatccacaggctagataatccactgatttcaacaaaggtgaaaaaattatataactaatatttgtccattagtagtagctaattaattgaaaacgtttgttctctgaatcgaaagagctgcataagagaaaggggacacgtgtcaaaaacagagtttaatatgaaagcgaagacaatgattctgttttgacttatttgtcatttgctgagctgtctttagaggcgccgagtagccgcgtctcccgcaagaaagttccaaagcaatacttcttctttcattgcattcatttccccaactgtctcaaactttgtgccgcataagcaaaaggtacaaataaaataataataaaaataaaggatggcgaaaacaaaattacttgtatcaaacaagaacattttgttaatttttccgagtgaaaacatcacttgatatggatatgcgattttagttgttgtaagtttctctagcataattgataattcctattaacatcaattttgatatagcattaggacttcaatgtttttatttttagggtttgttctttttgacttcattagtctagtggtactttaagaccactttttcacctcacacatggatgatccagacctagtcaagctaggagtgacttttatgtttatataatttatacatgttaaattattttagttttcttttttaaaggagatgaatttaattcggtgtggatcccgtctctagaaaatatagggtctttgggcttgaacttccaaatattcgaataacaaaaaaaattattttagtttttaacccaaaaagaaaacatttgcgatcaaatgttattgtaaacaacgcacactaaaaagacatttacccttttcggtgaagagacacagggacagctacatgcgacccaaaaaatgagcttaccctctatttcacatatgtaagaatatactctaattagactcagcatgtagtataaagaaggtgttgacaaaaaagctcaaataattcgataaactaacaatgcacgggtactaattaacaaggaattctcataaaattgaaggtaaatttaaacaacaataagagcatcccaattaggtaagagatttagttaagtaattgcgatcaaggaaacaagtacaacagaagtggaagtctgtctctatatcactttcttccctgatgcataaacttacctcttgttcacaaactttgttaacattttgataatgcaatgaaatgaaattagaaattcaaaacaaaaatagagaaaagtacaaccagtggactatagtccaattagtcaaccaaagtaacaatgggccgagctgataatatttaggcccaaaaaaagcctctggacgaatcagagacactggaaatgaacgttcttcttcgcactaactctcaaagaagaagaaaagatctgagaggtggtcgaatgatccaagagaagaagaacaatctctcttagatcgtttgatctgatccaatcgaagaagaagatgggaatcttattcacgcggatgttctcttccgtctttggtaacaaagaagctcgaatcctcgtcctcggtctcgacaatgctggaaaaaccacaatcctctgtaaattcactgcctcaatctttcgcattgtgtaatagatttgatatttagtagctagggtttttgattcgatcgttttttgagttgcgttgatgtttttgattctctgtgattccagatcggcttcagatgggggaagttgtctctacgattccgagtatgtatctaatctctcgattattgtatagattatggatctagtttatgtatcgtgattttacgaattttggttttgatctgatctttgcagctattggatttaacgttgagactgtgcagtacaacaatatcaagtttcaggtctgggatttaggtatgttttcgaagaatgtgttcgaacgcattaaactttgaatttgaagtagtagaaatgatttttggtattatatggaagggatattcgaaatctacaacactatataagcattagattaatccaaatcaaaccattttctgatggattcagttagagattctctgcgttcttctttctaagttgactagctccatggtagtagatcttcagtgtcacttttgtataattggaatgtttgtcttttgtatgaattaacgaattcatgatcagaattttccttgatttggagtccttagataagttgttgtcgtatgtgtcgttatattcgactttcttgttccaagttattaccttttccaactggtcttgatgagatagatgaagttctttgtattcaaatttgggtgataaagagttctgtattatcacatcttcttcctatagtttttattattattattgttttgcacgtgttgtatgtacatctgtcttgttagttatatgcgaatgcttttgcattttacaaaattggttcagcgacacagtacattaacaagaactttcctatgacaggtggacaaacaagcatcaggtagcttaatgacctcgtttctcatttctagatatgatgaacatattgcatctactgtgaaggaatgaagaacagaaatgctccatcaagattatactgtttttgttttgcccaattttctaatggtatttttgacaggccatactggcgatgctatttcccgaatacacaagcagtgatctatgttgttgactcgagtgatacagatagaatcggggtggcgaaagaggagtttcatgcaattttagaggtaaagtactgctgaggcttcctcttcttatactgttgtattattttgtgatggacttcttgcatccaaaagtaattgaggtaaaacgatgatgatgtatatcggtagttgaatggaaatacaatattggttcagtttcttgtttaggacttgttatagatgcttgtaagttgtatatcaagtattgttagccttctaataggtgatactgaaattgaagtatctcggttagtactggacggaaagaacaagtgatcatttctctctgtagatcttgctagctaatcttaaactctcagcaacaatgcttacttgagtttacctctgccactgtcagcatttaactcgcactatcttttcaactatgttttataggaagatgaattgaaaggtgcggtggttctgatatttgcaaacaagcaggttagtagtctctaaatgtttgctcttccgattagtttgggctgattcatctggaaatctgtattggtttctgttgctaaaaagctttagtttgttttgcatgcacaagacacttttttgctgatgaaaaatctataactatttggtctgagtttcattaaatcgacttaatttaggatcttcccggtgcactcgatgatgcggctgttacagaagccttggagttgcataagataaagagtcgtcaatgggcaatcttcaaaacttgtgctgtgaaaggcgagggacttttcgagggattggactggtaagcacattctgaaaccgaaccattttcttggtcccattattgaaacactgaacccatttctttatgcatttcttctcaaatattcttctctcatttccatcttgatcttcaggttgagtaatacattgaagtcgggaagtggctaaaatcatcgtcatacaccaatctgtcacatttctcaagagtgtaactttgatcatttttacttattggtttgtttagtatcttttttttatcttagttcttcatcttaaagagttaatatcaatgacatgttcacttaatattctctttttgttgttttgtttcattctgaaagaaaaaacccaacacagatttttgattgagacccataaggggtaatatcatcactttttaacatgaaatattgaactgattccagacgaaacactgaattggttccaagtggtgtttttgccgacttggattcagaagctcaaacgtttggggttttagaagtcctaatttatgtaatttgtctgctccttaattaatgataaaattgttgacactattatgccatttagtagatagtaagatttttttttaatgttttcaaagaggcaaaaataatttgcaaggaatatatagaactagcaagatactagcctaagctatttgattaactttcctgctaataatgctagtatgctaccaaaacaaaacacaagcgatttgtgaagctctttcttaaagagtccggctcggcgtttagagaatgtaacttgacggtggctctctttcttgatcttaccatagaatcttttatatggcgggtgttgagcaaattaacttaaacaaatttgttttattatcgtaactcaataaaaattacgatttctagtcataaacaaaaggctgtacatagcattaggcctgctacggatccggatatccgggttttttggagtatctggatccgtatccgtatccggcggatatgtagttttaggatccgcatccggatccgtaaacctcggatatccggatttcgaatatccatgaaaaaaccggatatccgcggatattcgagatccgtttatttttgggaacaaattcaatttcctatttcaccaaccagattgaattcaccaccaaaagagatcgacgtgtgcccgacatcagactttgcaaggcacataccaccaagatctcgtctttaacggtgtccaatctgctcctcctcattcatctccgccatcgacactttgaatcccatgtatcatcattcccgtaagtaaacttccgtccataaatttacgacggtggaaccgagatgaatatggtggggagacggtgatgaagattacatggagatgagatggagatagtgaaggaaatggtgatgaaggaaacattcacggcggcagaaaaaatatgttatgaaaccctaatagttaagtcccaaacaaactcaaattccatcattttgtcgtagtgggctaatattggactattgggcttaacattgataatgtgtatttgattaagcccaggatacaaatataacttaagcccataatacaaatatgtagacatattgaacggatgcggatattcggctctgatttttttcataatctggatccgtatccggatccgccggactcgtatccagatccgccggactcgtatccagatccgccggactcgtatccggatccgtcgcacctaattattcggttttccggatcggatcacggatccggattcgaatacccgcggataacggattttagtcccaggcctacatagcatctacggtaattattaactattaagtaaccatgggtaaattcgaatttccttgccgacaaaaagaaggaactttccattccttttgtgaaagtccgtgagaacatgaacccaagttaatacaccttcacatgattagccccacttctcctaaatgtctcgtaaactccaactattcggctaagattcactaacgtgtcatctctctattcgctattcccagatctccatgacccacttcactccctgcgcgtccggtacaatcgccacttccataacaccaagagtcaatacaaaaaaaaagccgactccattattatccctctctctacaaaaaaaacagtagagagagatatagagagcatcaatggcgtcgtcgtcaagactttgcgattcgtgcaaatcgacggcagcaactctattctgccgcgcagacgccgcgtttctctgcggcgactgcgacggtaagatccacacagctaacaaactcgcatcacgtcacgaacgagtttggctatgtgaagtatgcgaacaagcaccagcacacgtcacgtgcaaagctgacgccgctgcgttatgcgtcacgtgcgaccgtgatatccactcagctaatccactctctcgccgccacgagcgcgtaccaatcactcctttctacgacgctgtaggtccagcaaaatccgcttcctcctccgtcaatttcgtagatgaagatggcggtgacgtcactgcttcgtggcttttagctaaagaaggaatcgaaatcactaatttgttctccgatcttgattatccgaagattgaggtaacgtcggaggagaatagctccggtaacgacggagttgttcctgtgcagaataagttgtttcttaacgaagattacttcaatttcgatctctctgcttccaaaatttctcaacaaggattcaatttcatcaaccaaactgtacgaatctctctctatcttcttaagcttccatggatctggaaaattttcagatctagatctgaaagtttggatctgatttgagtttgtgaaatgttgttaggtttcgacgagaacgatagatgtaccgttggtgcctgaaagtggaggagtgacggcggagatgacgaacacggagacgccagctgtgcagttatcaccggcggagagggaagcaagggttttgaggtatagagagaagaggaagaatcggaaatttgagaagacgattaggtatgcgtcgcgtaaagcttacgctgagatgaggccgagaatcaaaggacgttttgctaagagaacagattcgagagagaatgatggtggagacgtcggagtttatggcggattcggtgttgttccgagtttctgatattttccggtgaaagaaacatggtagtagtatatcggttaatagcagattaaggataattaaaactaaaatgtttcctgatttaatcaggggctaagttattgttagaagattgttgttttttgaattaattctcacaattgtatcctaaattatatagtttacttaatgttgaactaataaattttgatttacaatctctgtaagaaatcgatatgcaaaaataaatgagttgagctattaagattaacattcatatagaacacaaactcatacaatcagctgtggtggtgtccgagactgcaaaattcaagaggcgatggaggccaacgttgatggtgaacgaggccagattcgagaagcaaaaacttgtcacgcggttgaagagaaagagcatttaaagaagaggtggttgtgggtttcgataccgttagagcaaagcacacaagctgcagagatattcagtccccaacttatgagcctgtctttcttaagcaatctacctttcaatgcaagctaagtgatgaaagaataccttggcactgcattcttgaaccaaacaaccttattccaaggaatcaaagtagaatgtgctcgtaattgctctcaagtttccttagaagagaaaaattgtgcaaagaaaccaaacattaagatatttagttattaatgaaaattcaaacatgagaaaaaacttaatcaaacgaaagcaacacaaaagaagaagaaatctacatattctaaaataacaaaccactaattctcttttagtaaatggtataaccttgaaggagaaccctttcaagtattagataatctaatcatttttcgtcgtcattactcataaagtgtcgaaatatcacttcatatcaattggtttgcgtaaaactgaccatacgtcttcaatgattgtcatatcaaatgattcgaaaagtgttggcatatgcatactctagttttcataatgaatcgattctcagactcttagcaaacaaaggaacataacatcatcataataaaattttgaatgaagtcagaaaccgcaaatcaaaactgtgaagatatgaacttgataagcaagtttaaagctaactcaagttaatataagttgaacttgggttgagttaaatgcttttggatcataaaggagggtgtccacgatgttgcaagggctggcacaagttaggacagtcttctcatcttgtgtttcaagcagccacgtttggcgtttcaagatgcaacctttaaggtttactttagcacaagaagctctagttttattatcactatcaattcacaacaatgttattgtggcccagcagttaagtctctgttccacttaagctttgacttataactcttgtagtcaccttcttcttcatagtggaaa

SEQ ID NO: 278 - DNA, 103495 bp, Arabidopsis thaliana
gaattcactcccactcgttattccgattcggtttttcttcgtgaagcgaggctcttaaagtatctgcaccggtgatcaaagtgaagtgtcttaagttagattaaaattttaatcaataaattgtaaaaatattaaacccaatcaaaaagtgacatgtaagtaaaaagtgtctttaacatatgtttcttctcttttctcctttcacaaatatttcaaatttatattaaaaaaaaatagtataaacactcgttaatataatcgatggaggtgcttttagaagacgtcgaagctatcttcaccaacatgggtctaggaagacctctctcgagagttccttgcctcattgaaagtcaaaaatattatatttttagctatttaagatatttaaatgttaataatgttgtaatacaatatttaagtcgtaaatatttgatagaccacataattatttttgtgcttcaagcctctcaaaactaaggaccggctttcacttggagacaaaaaatcttctgaagttcctttttcttgtatttttttcttccatttctattacttcacatacctaagtgcaaaaattgattgtatcatgaaactatgtatgttcgatataaaaacagaaatcataaattttgttaaatgccaggtaaaaactagcatatgttaatttgtttttgcaatttatcctaccataatactctttttctgtttaaaatttttaatatacttttagccaacgacaaaaccagtttatatgaaagttaagatgacaaaatactaatggtctacatatagcaaatacacaactagttaaattcttctgtaattttgctgtttacaatgacgattacacacattcttaaagctgtgatgacgaatcagagaaagctttaaacagctgtaaagattacacatctcaagttttagttaagtaagttattaacaagaaaaagttttgaaaaaagtaaagacctttaatagttttcttttctcggacaaaacaataaataaaaagaacacactttttttatcttttgtccttaggatttgattgtacatacatctgatctcaagtgatttcaagtggttggttctgttccttttctcgtccccgatcaagtttcttctcctaaactccagaatttggtcttgaagatctctaaaggctcttcctttttgttcatttctctacccagatatgtaagttgctagcttcttctgtcataactttaatatctgaatctttttccgatccaaatagtcaaatattcgcatctaggtcaaatcgattcaaaaccctttttgttgattgatgtgctaagtagttctgagttgattaagtctatcagtttaagagaaaaggattgtgtaagattatgattcgtacaagttagcttctttcttgattaggtccactgtgaatcatgcacacgtttatgaggaagatattagattgtgtaagattctgattggtttgatggtttcaagttagtttctttgttgattattgattgctgagtagttctaagttgattatgtcaactctgaatcatgtacaagtctatgagctagaaaatgaattgtgaattgtggagctaagaatgatgttgttgttttggctgaaagcgatgggtacatacctaagttctccgaaaactgaaaagttatcagaagatggtgagaatgataagctcagatttggtttatcgtctatgcaaggttggcgcgctaccatggaagacgcggttagtcaaaacataatcttatattttccttgttgattagtatcaaactacctgactgatcacatctcttgcttcaattgtagcatgctgcaattcttgatcttgatgataagacatcgttcttcggtgtgtatgatggccatggaggtacgaaactactgtctctactccttaatcatattctagggtgaatttaagttttagagtctttttcagttggtgttacaaatctgctagaattgcaaagattttagttgcttagatctgtgtaatatacttttggtacatttttcgatgtttggttctttactggtgtaggtaaagtcgttgcaaagttctgtgccaagtatctacaccagcaggttatcagtaatgaagcgtataaaactggagacgtcgaaacatctcttcgaagagcattctttaggtttattttctatttgacattcttgtatagtaatttacttttacaacaaatgttccacttaaaagcgtttcattgtgaatattgtagaatggatgacatgatgcaaggacaaagaggatggcgagagttagctgtacttggcgacaagatgaacaaatttagcggcatgattgaaggatttatatggtcaccaagaagcggtgacaccaataaccaacccgatagttggcctcttgaagatgtaaatcttttcatatacctgctttacttggcttcttccgtattctgtacacgattgagttgggacctcttacctatgtctttcttcttatacagggtcctcattctgatttcacgggacctacctcggggtgcacagcgtgtgtagctcttattaaagataagaagctctttgttgcaaatgccggtgactcacgttgtgtgatatcaagaaagagtcaggcttacaatctttctaaagatcacaagcctgatcttgaagttgaaaaagaaaggatattgaaagctggtggctttattcacgctgggagaatcaatggaagcttgaatctgacaagagccattggtaagccttttttttttctcttacactttcatgccttaaagattcttatttgacatgtaatcttgatagaagcatcgtttctgcctctttataggtgatatggagttcaagcagaataagtttttaccatctgaaaagcaaatggttactgctgatccagatataaacactgtaagaatctaacttcttttagtattttctgcttgagttttttcttatatttgagctgacttgttattgttttctctcatcagattgacctatgtgatgatgatgactttcttgttgttgcttgcgatggaatatggtaagagaaaagtcacaaaattgtgtcattttctaagtataagttagtttcttgatgataatttgaattcatattatcttcctcagggattgtatgtcaagccaggaactagttgattttatccatgaacagttaaaatctgtaagttaaccactttcgttctcctactctctattacagtttttgttcctgtcttggtcagtgacattggtaaaaactttcaggaaacaaaactttcaacagtatgtgaaaaggttgttgatagatgtttggctccagatacagcgactggtgaaggttgtgataatatgaccatcatcttggttcagttcaagaagcctaacccatctgagactgaaccagaagattccaaaccagaaccaagcgaagatgagccgagctcatcaagctagatatctttaaagagccaagaggaagaagatttgtgaaagtgtctcttttatcattgactttttgttcaacattgtaaatccttttgaatgtggcttagattcaagaagctggctttttcccagtttagcttcaagaagtctgagatgtcacagagtttggtttaatcttaaaaggacctttgtatagatatttcttgtgattgatgttttcagctatagtttaaaaaattcacaaggacaagctttttgtaccaacatcatgggatttgttttcatcaaaattgcttcttctactaaccttggcttaatattttattggatctttcatatttcttgtgttactggcaaaatttgtagtatttcataatcttttctaatttatagatttttgtagatttttattttttagtcaatttgtggcagttctgagaaataataataaattgaatttataacaaaatagtagcaaggagccaaaggacaaagatctcttagctaacaacaacacaacatgtaatcataagaaagaaagctttttgaaacaaaaagctcattctaaaaagcaaactcatcacatggttccaaatcagaaccaagcacatagaccaagaacaagacctaacacaacataacaaccaccaagcctaactgagccgctaatgggagctggagccaaagctggaccatcttcgaattcaaccggagaaggagctggagagatgacactgtgacgaggactgatcacaacaaggctcagcttctgacctttctcacagtgaccattagctccactaatgaagtagaaaggaccagacctgtccaatttcaccttggtttctccatcagtgtagttagccaaagggttcgtggtgttgcagctgttgtaagcttcttttgttacttccaaaacagagtctttaccagattcataccggaaaactgaaaaagacagattgtgtcagaacagaaacaaagtctatgtcagaaacagagtattttttaatggtgggtaccaataaagtcgccgactttgaagcgagctttttgagcccactcagtgaatgagtaagaagaggaaggagggatcttccagtcgccggattttccaccgacggtgacttcatttgcagcggcgagtgagaataagaagattaaagagaagatagcaacgtgaagtgaagaagaagccatagatgccgatagaaacatagtattgagtagtagagaagctagttgcttggagtgtagtgttaggaatgttgttttggaaattgctgagttatgaggaggttcttgtgaggttttatagtggtgaaaattcgaaaactagccgttagattatttactttttgttttgttgtgaaaaaagaagaattttgaaaaggtaaagaaacgttaaatgtttgttactgtagccgttgcgagtgatgtaaccgttagagaaaatttgaaacaatgtaattatggatactgacatttgttgtgtgtgtcaggcaaaactatgagtgtttctcgttgtctcgcttttaattttgacaaaataattgttcgtgaataaacgtagtaaacaaagtaaaatctagtcattctatttggtgatggtgacgtttgggtattgccgtattgggcctattagctattggggtgatacgtatacacacctttacattttcggatatatttgttgagatcactcctggcccaaagaaaatagaaattttcaaaaattttaacaaggaatttacgttgttcttcttttttcaataaggatttcgaatcaacagagcaaggaccaagtgctaaaaccaattatcaattgagttatcttctttataacatttactagaacaagacataagctcatctatgactatgagaggcgtgtttatacaagggatttggtttaactaatagcaagaatggctcatgagtttaccaactaacgaggcatcaactcatttactcagctacatgatccgtttgtgcaacgtttcccactgattgagactattgtactgacatgtctagcatcaccccgtaaactatagtattgtttaggtgaatttggtctccctaaccatatatagggacatgaagaaaatgtcttgtgcagtttgtcagtcatattagtgtattatatcttgttacctccaataatgtcatatattggaaaacttgagaagtgatcagggccgatgaatgaaacattttttttatgtaatttggttaaaaagtgtaacgaaaaaataattaaagtgaaatctacttttcaaaatcgttaaaatgttttttgtgaacttcaaaaaatataaaaaatagcttacttttcatttaaaatgtctaaatttaatgtaaatattaaattagaaaaatgaatttatacatataccaaaaatcccagttttattttgtatgtgaccccaatattcttaaaaccaattaactttttcgacggaccaagtattccgtcgatttggttcaatatatatgtaacgaaccataatctacctttcgcggttgaatcggtagctaaaaaattatttctaacaaatataaaattacaaaaattgtatttttctcattaatgacttaaaaacaaactatgatatctaagtgtgtactcattcaaagattatttaatttttttaaatgaagtcatggcaaaaggaaataaattgcaaattccgagtttaggaaagaaaagaaagcaaatcttaaataactcaaaaaagaatattggaagacatgtatcatagtcctaaacaaagtaacagatctttgggtcctcctttcttttttttcccttctatctgaaatccgacatcatcctcaatctctgtctgaatttctcaatagctatatcatcttcttcttggtcttagaatcaaagaaaaaccctagttcctcttttcccaagataaccaaactctctctcttctctctctgcatcattccctttcttctttctcgcatgtgcagagctatcaaacatctgttttgattgaaagctaagtttccaattccaaaacggaagaaattgaaagtgtgtatgtcaagacaaaccaccaaactacaaaagaaacaaaacccacatcgcattgttccttaaagacccagcaataagattatctcacgcttccttctttcttcctgacatttttctcgtttttgttttctccttatttggggtttttcctgcaatgtgggtcgcatttggtcataagtgattatttctagggattgtgtgacctctctgcttttttgagttaagcatttaaagaaacctctcaatggcgttgtttagaaagttctttcacagaaaacctcctgaagggttgcttgagatctcagagagagtttacggtatgctctttcttcttttaagtgatgggtttagggtttgctttcttatccttgctcttctttgggctttggagtattgatttttagaaagtttgagtttttaggtcttaagatcagattttgataagtgtagtgtcctgttttagtttctagttctttttaggcttgttgattgaactgaatctaacatttgatagactaagattcttgatgggtgagatttagttcatggattctgttaactatccatgagcacaggctcaggctcattggtggaaagtctatctattatagcttaagatgtctcattctcaaagaattgtcaggaaacagtttcttttgtatggtcactgggttgcatgatttctcaaatccttttgcttgtcttatcccttgctcttagagtattaaattttagaaagtttgaatttttaggtcttaaaaatcataattttagcctaagtttatagtgtacttcttgttaggcttgttaattgaactgaatctaacatttgatagcttaagattcttgatcggtgagatttagctcatggatagatttttcaggttttgtatgttcactgtgttgcatgacttctcaaattcgtccttgtcttatccatgcttagctctgagaaatagactattttagtgagaaagatacaaaagattgctctataagctgcttacgaaatataagattgctctataaggttgctgaactttgatgtttttgtattacagtctttgattgctgcttaaccacggatatgttggaagatgaagattacagagtttatgtgagccgcataatgagtcagttaagggaacagtttcccggtgcatcattcatggtgtttaatttccgggatggagatagcagaagccggatggagagtgtactaactgagtatgacatgaccatcatggactatcctcgccattatgaaggttgccctttgcttacaatggaaacggtgcatcacttcctaaaatcagctgaaagttggttattgttaagtcaacagaatatcttattgtcgcactgtgagcttggcggatggccgactttagcttttatgcttgcttcgctcttgttataccgcaaacagtttagtggagaacacagaacactagaaatgatatataagcaggctcctcgtgagttgttacagctaatgtctccactaaatccgctgccttcacagttgaggtttcttcagtatatctcgaggaggaatgttggctcacaatggccaccgctagaccaggcccttacattagactgtgttaatcttagactgattcctgattttgatggtgagggtggttgccgacccatattcagaatatatggtcaagatccttttatggcttctgatcggacttcaaaagttcttttctcgatgcctaaaagaagcaaagctgttaggcaatataagcaggtgatatcaagatctttatcattgatgtgttcatttatacagactcttcccagtatcagagagttatgatagtcctaacttttcatctactgttgcaggcagattgtgaactggtaaagattgacatcaattgccatattctcggtgatgtcgtgctagagtgcattaccctaggtagtgatcttgagagggaagagatgatgtttcgggtcgtgttcaatactgcatttcttagatcaaacattctaacacttaaccgtggtgagattgatgtactgtggaatacaacggatcggtttcccaaggatttcagtgcagaggtgactaattatcttctttctctttaataagtagaccaattttggtttcctagttaaaagagttgcctgttgtctaagctttaaatggtcagtcccgatgagctcagaattatactagtcatttgtatagaagtacttcgtgtaatacatctctctgagtcaagaattttgtgcatttaatgattaatattagtgagttcagttttgagtctggcatatctgttaaaagcattttatgttatacatagctaattgtctttccaagtcaagagaggagtaacattctgtgtttgttcaggttatattttcggagatgggtgctggtaaaaagcttgcctctgttgatctgccacatatggaggaaaaagatgttttacctatggaagcatttgctaaggttcaagagatatttagtgaagctgaatggttggatccaaattctgatgttgctgtgactgttttcaaccaaataacagcagcaaatatccttcaagaaagcttggattcaggttctcctcgaagccctgactcacgtagcctattggaatcggcacttgagaaagttaaggagaaaaccaagttgatgatatcggaaaatattgtttcaagtcctgatacatcctctcctgaaaaagagaaagatacaatgtcctctcataaatcttatgcagatccgaattcaatccttaagaaggttgacgaatcgcgtggacttcgagtttcagtccaaagaaatgttcactcaaagatattttcacctcgaatggtccaaagtccagtaacatcaccacttccaaaccgtagccccacacaaggatcacctgcttcaatatccagatttcacagctcaccctctagccttgggatcacttcaatattacatgatcatggttcatgtaaagatgaagagtctacttcatcatcaccagcttcaccgtcaatttcgtttctaccaacattgcatccgctgacatcatcgcaacccaaaaaagcttctccacaatgtccacagtctcccacacctgttcattcaaatggccctccttcagcagaagcagcagtgacgtcatcaccattgccaccactgaagccactgaggattttgtctcgtccgcctccacccccacccccacctcccatatcctctctgcgctccactccttcaccaagttccaccagcaattccatagcaacacaagggcctcctccacctccacctccgcctcctctacaatctcaccgttctgcactttcatcttctcctctgccaccacctttacctccaaagaaattgttagctacaactaatcctccacctccaccaccaccacctttgcattctaattctcgaatgggagcccccacaagttctttggtgttgaaatctcctcctgttcctcctccacctgcccctgcaccattgtctcgttctcataatggaaatattcctccagtccctggaccaccattgggtttaaaggggcgtgggattttacagaatcttaaaggtcagggtcaaacgagaaaggccaacttgaaaccgtatcattggttaaagcttactagggcagtgcaaggaagtttatgggctgaagcgcagaaatctgatgaagctgcaacgtatgattaatatctccaatactaattttatacagttttgtgattttctttattatgctaattgcagcattgtgtcttttgaattccagtgctccagattttgacatctctgagcttgagaaactcttctcagcagtgaatcttagctctgacagtgaaaacaatggtgggaaatcaggtcgacgtgcccgacctaaagttgagaaagtgcagctggtaattgattgcaatgaacattctactgttccctaatttcttaagtcttttaatttgcgaagtttcacagcatgaaattaagatccattgacagttactctattttcgtcctctaactttgtctattagttttgcagattgagctcagacgagcatacaactgtgagatcatgctctctaaagttaaaatacctttgcctgatttgatggtacgcacacattccttttgcaagatattgctttgctagttcttgacttgttctcttaagctctactacttggttagtgcaaagttcactctgctctcatcttgttatgcaagagctgcttaaaattttcttaacttaataatctttggttacagagttctgttcttgctttggatgagtcagtgatagatgttgatcaagttgacaatctaataaagttttgtccaacaaaagaagaagcagaattgctcaaggtacatttatttctggttcttatctaaaatttttctgcttcacgaaaattttgaagttattatcatccggcaatatcttcttttgtgattaaacttgtgctacatctcatgtcttcgtattcttgcttcggtagggcttcactggaaataaagaaactttggggcggtgtgagcaggttagtcgggtgctccactttcatatttaaataatctttcgagtttcatctcttgattatgtactgacagctatttttttacttttctggtgatagttctttttagaactgctgaaagttcctcgagtggagactaagctaagggttttctcattcaagattcagtttcactcccaagtaggaaatcgactggagtttgtatttttgtcataatttctagtttctaataacctggatcttatattagtaaatgtttttttttatcctacaggttactgatcttagaagaggtttgaataccatacatagtgcagccaatgaggcaagtcgattttttgtgcaaatagtctatgaaacacatatattaattttggtgattttccattctgactttactgcatgttacactttccaggttagaggctcggctaaactaaaaagaatcatgcaaactatactttccttgggcaatgcattgaaccacgggactgcaaggggtgagcatatatctattaccgttagactgccaaatacagtatttatctcaaagagagacattggttctattcaagaatttgaattcgcttctgcatttttttttatatatttcttctcttttgacaggctcagctatcggatttcgcctggatagtcttctgaaactcactgacactagatcccgtaacagtaagatgactctgatgcactatctctgtaaggtattagactttccaatcgtctccaactctttttttgtttttgtctaatgttaaaatctctttgctcttaactagtatactatattttttacatgcattagtctttatccttgtatgttatcctaacagtttcttctcacaataatattttcgtgcttgtactctcaggtgcttgccgagaaacttccagagctacttaattttccaaaagacttggtgagcttggaggctgcgacaaaggtacttttatttttctttaactcggtgtttaataatacacctcaattcgaattgtgcctttggtgataatctctctgaaaacattcctttatggtagattcaactaaaatacctggcagaggagatgcaagcaattagcaaagggttggagaaagttgtacaagagtttactgcatctgaaactgatggtcaaatatcaaaacactttcgaatggtaagctaaattagatattcaagaagcttctttcgttattggttgctagtgtttcatcatctgcttacacttgtacttgtattatgcagaacttgaaagagtttcttagcgttgctgaaggagaagtaaggtccttggcttctctctattcgactgtggtaaggaatctttaattctccaccttctccctggctttactttctaaagcactgtactgtggtaaggattcttttccgctatcattgacctgtgttttgtcatggcattcttagggtggaagcgccgatgctttggcgttatacttcggagaagatccagctcgtgtcccatttgagcaaggtaacaatttaatgcaaactcactattatggtttcttctcttcttacatcttattttctatacattattttcatttggtttttggagttgtgtcctttctgtccctgaccttaagatataccaaatcttggtgtttgatttgaatctgcagttgtatccactctgcaaaactttgttagaatatttgtgcgatcacacgaggaaaactgcaagcaagttgagtttgagaagaagagagcacagaaggaagcagagaatgaaaaacttaagaaaggtgtgtacaatgagaattgaaacacaactactcacacaaaaggatgttgttctctactctcgctcgacttccttgagtagcctttggcaatcccaggagctggaaactatatatcgtggctcctagtttgaggattttacccaaagttagagaatttccccagatttagttcatcatctgacaagacactgctttggatttagtcttttagattagaagaaaaaggaggaaactttgttcctctagtaggtgtaacaagaaaaaagtaggtaacgaaaggagagatgcagaagaagatttagctttgtgttttgatggagatagtattagatagacagtaatgcaagagtttgagtccctccctggtttaatacagaaacagaaatgtatcttcttgtgtataaagtcttgggatggataaagagagagatgtgtaaatattgagtgagtttgtgtgactcgtatccaatgatatattgattgttttctttttgtcaatgcatagacaaaagttgtggcccatagaataaaatccgaacagagcatctgtttatatttcaatctgaatttggttgagaaagaaaacaaaacacttcctctattttcgaaacaaaataaaattcataaacataaacaatttggttgacaaagaaaacaaaacacgtcttttagtgatgtgtccaagtatcagagattcatgttgatccatggatgtaaatgttctaaagtttggtcagaaaatgatatatatagttctcgactccgcgatgttttcaacaccatgaggcaaaaatcgaagaaggtattcaaatagagtaagtattcaaaatgtatgttgaaacaaaaataagttttaagatttctctattcatatgatttcacattgttttcaaatattttaataactttatgtgctcatgtgatcatagtaattataacatcttctctctctttttttttttctttccttgattttgtaaaatgttcttagcttttaagattagatcatgatattttttatgttggaaaaactataagtttagtagtaaaattcttatgagattttagtcacataaataaagcgattttcaatttgattacaaaatttcaaagtattttttctttttgtgaacacatatcaaatttatagtctttttctcatccaagttagataaatcaaatcaagatgtttctacattttttaaaataaatctaacttggttgtaaagtcattttatcttgtcatagtataaagtattaattaattgggattatactcttagcattacatatatcacatagtaattatttataatagactttatatatatgcacatcaccttgaaaatgttactgattaaggaaaaaagtaatttggatgggaaagaacaaatattgttcgatggtaaacatcatttcaaaactcattgagaatgatgatgcgtctatgatggacatatagttttgaactaatatgagtataagttttttgggatttatgtatatgggctttgggctatccattaagatatttcttttacatagaagcttacattgattgtttaccctaagcctaattttctttacttatgatcaccgcttttaatctacgttcttctgtgtattgctaatttcaaaaattggtatttgatggaactttaaccattgaaatttgttaaatcttttcatggtgagtacttctctattaattacatgatgcactattatctaaattagttctcattgcaaatatggagtatcttaaatttacaacttgggtggtggtagactctttatatatcacatgtttagtgtcttttatttaagatatatactatttactttttagataaaagtttgaatctcactaaacatgtgatatatcaaaaatctattaccaacaaaagtgtaaatttaaggtattctaattttgctaagaaaactaatctagataatagtgtatcgtgtaatataagtgaacaattactcaccatgaaaagatataaaaaatttcaatggttaaagctcagttagtccaaattttgaagattatcaatatacaaaagaatgcttagtaaaaccagcgattaaaaataaataaaattaagttgagggtaaacaattaatgtatacgcttctatgcaaaatatatatctttgtgaatagccgaaagcccacgattcaggtttgtgaaagattaaatagactaatcagggacatctccttttagggacattaatctccttttacaattcgctcggccaacctgaaaatgtttaagaatagtatttcagtacaatcataagtttgagagatataattacagactaattacccttctacaatagcggtttttccaacacccggttcaccaatgataacaggattgctttctgtcatcctgcatagtatttggatgcaccggttaacttcatcatcacgtccaatgagaggagggagttttccttgtctagccatcttggttaaatcacttccatatgtttcaagtgcttcatgcttagcatcagtctacatatagaaaaaaacaccttataagaaactaagataatcactaacctagtcaaaagaaaaaaacgtatgatgattaattaatgacataatgaatcaaaatcaaccacgaacctgatttgctttatccgagaagcggcgcagagacgggaattggagagaaagaggtaagagttgtccacgagaacgagaagcggcttgagtggctgaagttataccgtttccggaaactccgatgaaaaagtctggccggaaaagaaaagaactgggagaggaacgtgagctgaagtgagcacaggcatatagggggcgagaacgaaggaggagagaagatgaattggaacaagaaggagcttggtttagtgttttaaaagaagaggaagattgaggttttaagatgcttggagaagaagcaaactagtgtttggtgaagaagcaaaaaagtgtttttgtaataaatattcgtacatatgttataaaggaaacgtttttatggcagaaatagaaagtttaaaacgaaatagaagattatatatcagaaatgaaaataattattcattaatctagattttccattttaccgtaaaatacagcaaaaattagaataatgcatttacaatgtttttttctaatactaaaaaattatgtaagatgctaataaaagattagtttcttcagtgatcaataaaaatatttctgtgttaaatttgaatattttttttgtttcctttggtttttgtgtattgttgtttactgtacttgtttattattttaactttgaacgcatatgggatattaattcctagttatattatcgcattatatgatgatagtaacgcattatcttcggtgtagatgcacttctatatgctaaaacatgtattgcagaatgcttttgcgaattttcgtacctatatatgaattatttaaatgatttaatttaatttattatttatatgtaatctcagcttaattaataagaaacaaatattcttatgtatgttcatgcatatttgattgggaaatttgtcagtgttgatgagctagccttttggtttagcacctttctattttgcagtagatgaaatatgtgtccaccaaatctcgttcggctatttgaaaaatttcatggattattgtagcaaatattttttgaattaatacaaaaactataagaataaacatttcaatattggaagctacataagtgaggatccgattcaattatccctgtctccgatttgattcggtaagaaaatcatatctgtaacaaaacactatacgtaatagtagtctcaaccactccaacttctaattttcaaatgcttatgttcgaaggaagaagacagagcggtaaagtcatgaatctacaaaacatagaacaaaaccaaatcttctaattttctttgacatgagcattattctccatcttcttgatgaccagtttgttgttaggctggtcagcatcgataagaatagtgccatcctctgcaaaatctcctttcaaaactttgagggtgatctccttcttcacaagcttctcaatcatttgcttcaccggtcttgccccattgttggggtcaaagccaagctgagcaaggagatccacagcttcttttgtgtactcaagatttattttattctgttccaacctcttcttcacttgtctcatctgcaccacctctataaggtaacaatacaattataaagggacatgagacaatatccactcattgtcaatagcaatgggcacgaagtatacttgaacaaactaatctatgtgaagaaatatgagaagagacttgagtagtatatgatggacatgggataatctactcattaccaattgcttttgagttggaggcctatgaaacttaacaatctatagatttaaaaataaagattgtgaaaactaaataggaaaaaacaagagtaagatacctgtaactccacgattttggatatttcgcttgaatttaaaggctgagaaactatgtattcatcaattctattcatgaactttggcctaaaagtttttcttgctaactccacaacttgttgcttcatcatttcataaaatgcttctttgatatcttcattgttgcgaatagtctcaagtatatgtagagatcctatattcagggccgacccaaactatttggctgcctaaagcaaaaaaatttagcccattaatgaacactgttaaaaacacacacacaaagttttagaaaactcgagaatcaaaaccgtgacttttactttaaaaatgttagaacaaccactagaccactgcaacatttttaaaaagagttatacttattgatgcctaaagcccttgcttcatgggctgtagccatgggccggccctgcctatattagatgtaattattacaaaacagtttgtgaaacttagtgtcctaccatgagaattagttattcttccatcgtctagtagttgaagcaagatactgaagacatcaaggtgcggtttctcgatctcatcaaactgaaccactgaataaggtctccttcgaacaacttcagttaatttcccaccgtctccgtaaccaacatagccaggtgatgcaccaacgagctgtgagactaacgttttttccatgtgctaactcatatctatcctcactattgtgttttcattgttgaaaaggtatccagctagtgccttggcaagctcggtcttaccaacacttggttgtcccatgaacataaaactagctataaggcggttaggatctgaaataccagcctttgaacaacggatagcatcggcaactgactctacatccaagtcttgagcaattattctctcgtggagtatttgttccaacatgactagcttttctctctctgattgctgaagattggacagtggaatataggtcacttgcttactatatccgctatgttaagcttggttacttattctcggactagtgaatattcatgctttctagaatttgtgaggttctttctagcttcttctaactggccttggagggatacaagggttccatacttaagttggaaatcgaacacgatggcggtcgcttctttcgtgtggaatcaaatgaggggaaatgattacgaggtgaggtgcaccacagagtaatgataagactctgatacaatacaagttcgaagccttgatgactcgctcaacaagacataaaaacaaacactaactaaaggaatctacctaatttagatgataaacaataacaaaaccccttttctttttattttgttacaactaatagataatttatacaaaaaagtaaacattaataaaataacaattattatcaaaatatattcaatgtgtaaatctgaaaaagtgacgcaaatatttgaaatatagttaatattgtattaattcttaaaaaaatcatatatttgttttatgactaaatttgttttctacaagcctaaatttgtttgttataaatacttcttaagcgcaaatatttgatatactgttaatatacttattttaatgtctagttaaatgaagactttcaatgtaaatcaaattcaaatttgggtctactcatattttattttggacacaaacataatacaagtaaatattaaattttaggaaattatttctatagattaaaaagtatatttataattttctcctttttgttaaagaaattaggatttatatatgtaaaattctttacaaaacatttattatttttgctgaaaagaaaaaccaattattattttaaaaggaaataaagcgtgtatgttgtgacttttggcagttagaagaaaagaagtgaagacaaaatttaacgcttctcagaatacgaacatttaattgaattttatctttttaaagaagacgaaatgtaacgttttttttctttcaaacgaccagtgcatgttatattagctgacataaacaaagtcagaagtgctgtcgaataaaaaaaacagtctgaagacaaattttctataaaaacagctaatgcatttatttgtccagctccaacacttttctataatacaagttaaaactttgaaactgattatgagttcacatgacacatgtgaattactaaaacaaacatacaaaaacgtcatattaaaagtttctttattgatgtttttttcctagtagcttttataagttagaagtgaaaacaaactttacattttgataaaaatatatttcattctcactctaaacaatagttcattttgctggtcacttctaactaactcctattataatttgttgattgtaatggatgtgtaatcaatttaaatatacaaaaactggtaataaagatttctttattggttaagaaaataaatagcttaatttggattttttgagtttatgattttagaactacaactcaattatataaagagactcttaagaaaatatgtaatatttcatactaaagttgacaaaaaagtttatattttcaacaaacaaaattaaaatattctaaatggaacccaaaactatagaccgtaagtacttaactctaacctgaaaacttaatccataattacttaactctaatctaaaatcttaaacaaatcccaagaaaaaatcataatttatttaaacccgatataccaaaatgggttatttcttcaatatcaaaagaattaggattttctattatttatacatttttagttttattataattatcatatttacattttaaaaattgtttagtttccttacacttaattttaaatttataatttctaaaacttatctttctttcttctttttttttttatcttaaatttcgtttttagtcttaaaattaataaaaataaagttttatttaacacgtgtcaaaatctaagatggataaaattgacacatggcacaatcctatgagttagtaactcagaaaaccatattttatatgataagatagataacaactaaaagcaagtcttatttttctccgtcaaatcttctattaaagagttctctcatcggtgcattaagggttgcaatgctcaaaaagaaagttgagatggcgtattagtcgagagcaaaaactattctaaaaatttgatttgagatgactacccttgaaaaggaatatcacactatcatcggtaaggagatagtttccgatatctggtttgacgggagacatagccgaggttaacataaatggtgcgatgattactatcttatatcttcgtatatgcggggtaacaacgatgtcataatcaaaggttagtcctaattgctgatttcttattttatttttaactgggttgttttcaatcggtgtattcacaattataggctttttactttaggctttttacttagataaatcgattaaggtagcaaattgtaaattaatttaaattttttagatatttcatattcactactttggaaaacaattgctccaaaataataaccagaaaattgatacaacttctcaatcaacttaatttatttatatcttcttctctttttggcacaatggtttttttccttctatcatgtaggtggagtcttaaattttacatatcaaaagaaattgttagtcttcttttcttctaattgccaatattttcattattgtatagaagcgtaagggtggacacggattggatattcaaaatttatatgttatttctgatccgttccatacggatattgactttttttatatgtatccattatgccattactgaatatttgatgtctgcatatccgttaaaatttggatattcattaagatatatgatctactcaaaataaaatatttagactagatagaaaaattaaaattttcacaatattattacaatatttcataaaatatattttactgaagcttgattctggtcaagttcaaattagactaggttttacccaggttgaaaaagcacttagcagttggtgaagcgttattttcttcaagttacactaggtttatgaaactctttcctttcgagattattaatctcacatgttgacatctattgtggaatccacaatagatgtttagctaatggaaaaaagtgtttaatggaataaaggtcaacggcgttatattactcgacttctacttaggaaaaacgaatacatgatcttagcatttaaaggtttttaagcaatatagttcacaaacaagataattcttttcttgggctcaaagcaatttttcaacttggtatgttttaacaaaaacttttagatggttggagaaatattatcttaattgtcatttcacttgtcatctttgataaatgaactaatccaggaaatgagataaatgagcattcttaatttttgtgtttgtatcaatagacatcacacaaagttatattcacaaggatactaaccaaaactttataagagagattttcaacataatgaatgccaatttaggaagcataacaaccttgggaacaaaacaaaaaggtcttaaattttgattatgaaatgttgaacctacgaattttaaaatttattttttgataaaatggatgaaatttttctaaaatagttatatattaattattataaaaaaagataagatgttgtcaacaattaaaatttacctcagttaaggattcaattgaatcaacatttgaatatatagctttttgttgcttttagcaaagtttgtgttgttgtctcttagaacacatcataaagagtgctcaagtaaaactttaatatttggatgatcaaaagagaaaaaaattccacctggtgaaaacacgatgatcgcaatttcaacatcatagaacgtgcaaagttcactagctttcttgaaaagaccagattttctatttgaaaatgtaatttgaaggtttgattgatttttttattttttatgtctctatctttttacgaccaaaattttttctcaccattttctagatgttttggacaaagaaaaagtgaattgattgtattagagtattagagataacatgccattgtttttatagacaaaaattaccaagtaaatatatattttgagctttagaaagtaaatatcgattactattttaaattattagaaatacaattataaattacccttctgggagtatataatggtttacacattttatcaataaaaggtatataattatattttagctgttacacaataatttatttatttcataatcatttatttattacataatcacttataggtatttagtgaaattatggcgggttgtaaataatataataaataaatgattatgtaacagctaaaatataattatatacattttattgataaaatgtgtaaacaattatatactcatagaatggtaatttataattgtatttctaataaactaaaatatgaaaagatattaacttcctaaaactcaaatatttacttgtaaaattctagtctataaatacaaatttctgttatctcttatactctaatataatcaattcgtgttttttgttaaaaaatctagaaaaatagtgagaaagaatcttggccgtaaaaatatagagaggaagaaaatgaaaaattaatcaaacacttaagttacatttttaaagagataatctggtctttttaagaaagctaatgaactttacacgttatgtgatgttaaaattgcgatcatcgtaagtgaatctttttctctttcggtcatccaaatattaacgttttacttgaccactcttaatggagtgttctatgaaacaagaacacaaacattgttgaaagcatcaaaaagctatatattcaaatgttgaatgagtctttaactgaggtaaattttaattgttgacatcaagaagggactctcacttaagattcccactggaaacagaataagtggttctcacttattgttattatcctagtatcctagtagttctcacttattatctaatcttttttttttctcttatttttaaattttgataacaattaatatataattgtttcaaaacttatttttgatttgaaatggtaaatcttcttttcaggatgcacactcaatttctctttgattttaacattctacaaaattttttttaataagttatacactaggaaaaaattgtctccttgtatattagtgtttaagatatattcgtaggttttctttacacattcatattcgtaattttagttgtttatgtgcaaatatctactggttgtttgggtgtaagttgcttgaaggagagttaattaaacggaagccgaatgaccacttttgtaaaaccgtaacttggatctcatttagttttttttcggttggtttcaatctggtttatgaatgtatgaatatttgaaataataatagtttcaccattatattttgttataataagcaaaagtcatggtggtggaggtgaattgaccaatggctcatgtatcactgaaagcacaatgccttttacccacttaccatggctaattatttaaactagtcattagtttctttttcttattatttattttgtataatggatctatgtaagaattctaacaaggccttgttcttttggagattgtcagctactagtatgagaaattttagatgttttcttcagttagaaaaattgtttagctagcaaaatgttaactaactcaatctttttatgtatatacagtttacttcatatttatatttttgaataaaagagttgctacatagttgattacaagaaaattgttgtagccaattacattcaaattaaacttttatgtgtatttttttaagtaatattatatttttgaccaaaaaataaatagttatataatattttacatatcaaaatgcactgttattcttattttcttccagctaatgatgttgaattacatatgatatgtttctacatataaatagacattccaaaatgattattattaagccattactacttactcacataagacccaaaaattgagtagtcatttttgtttgttactccatttgataaaaagtaaaaacattgtggtgacaaaaaatacaacacagtctattttcaagccaaaataaaatacataaatataaaagagtcaatgttgactcaacaaggaggccgctctcattttacctggaaacaaataatagtaaacacataaataattggttaaattggttaaaaacatccaaatagctagataaaaaaagatcaaccagaattaatgataaattaataacttaaacccaaaaccaaccttttgtatatggttttaatgtcttccctcatgtatgaagctccaaggaagtaatcattgctgtagtttccatcaatggtcggaatacaaaaattttcatctataggataagtcttcccatcaaaccatattccagaaattatctcctttttagctgttattatgtcttcgccttcttctgatgtatccgcagccacaagcctataggaataaactttgttttgttgtcctggatgataagccaactctatggcttgtcgagccatacaagggtttgcgatgatgtcaagcattaaaacccttgttgcacccggaagagctatctgctcattacacgctttgatggatgcaaagaagatttttgcatcatgtgagttgttaaattgattaattgatgagcagaatgacttgtatcacctttgatcatgaaggtttctttgccatctttccaacctttaatcttagccactagtctttggaggaatatcaatgggatgacacattggctcactacaagaatcttctcattcgtgtaaccgcataactttactaaacccatgaagaactttgtttttacgccatctgttacgtcaatttctttgatgatctcatccatctcatcctcgttgggggcaggaagaccttttgcccggtctgagaaagcacatagctgtgggtgaagcatgattccgctcaaggtagaatacgttttgaaacctttccctttggactttcattcaatctcccatgctgacttttggcttaatgtcggttttaagaccaccgtgaagtccatcaatcccgggacctcaaggagaaactcttctttgtgattgtaaataaacttgtttgtcaacatccttagttcggttaagtaactaatcttgtctccatgatcagaatcttgactaagcaaagcttcttccaatttatcaaacaagggcatcttcaaattcgttgaaggtccatcagcttcaacattaaggaattttctgatatttttaccaattcggttatgcttcagaaactcagggaaaacaacatcaagaatgttgaaaacctccttaatgttgttttggtatagtgagccagtgagtagaaccttatgtggcgtcttgatacgagcaacaaccttaagaaagctcatcatctcgttcctcggatcagttcctctgtcgaaaacaaccaccgaaggaatgtttaagagtatatccctacaagaatctgaagcttctgcaccactgttatcagatattatgttggagaattgtttggcgcctaagaagataatactccgggttttgatccatcggtttagaacctctaactgctgagatcgggtactcgcctttgccgagtagaagtctagcaacacaaggtcattgaccttcaattcaccaaactttgttttccaaaagttcaacacccatttaggaagcacaaatagaggtttactatttgggtgcttttctaagtaaccatagatgaaactgatcatcaagaaggtcttttcagataaaggagtttgagctatgatgcatccatttgagttttccacaaccaagttcttgcagagaaaattgaatatctcgaagtgatgtggtttcataatcattttatgcaaaggatgtgggaaaatgccagttcctgaaaatccatcttttggaactctcatcttgatatctttgcagatatttgatccgaatccgggtggcaacggatgatcctgaacatataacagattaaagtgaacaaaatgttttaaacgtggaccaagctagttgtctactctatatgaacgttaaccgggtgacctttgcttaaataatttatttttttttctttttttttttaaattagttacccaattaaatatattttaacctataacacttttaattaaaaacaatgaactactaagaatactttgatagtaaagtattaaacaatagttattaagatgtttttcaaatatttatttgatataaaatataaaaaataatatgtaaaataaaataaaagtatatcatatctcaatttttattttagttgatgatcaattagtattaatttattatgatttttgatatttgtgatttgttagattacaagttatttttgaaggatatgtttagtttaattttatcagtcatgtataataaatatatctattttatataaaaatttcttttcatccggtttgttccggtaaaagtagattgaaccaagatccaagtttttgtcacgttgcctctagttcagtttttacattattgtgtaagaaaatatattaatttgcaacataattaaataatcactgaccttgttaatgataccacatatccaacaagtatgaccaagatcttgcttccatatccaagaatgctcacaatttgtcagtgttgctccacttttctagtaaaaggtcacaaaactcattaataacaatcttcccctatgtgtttacctaaaaaacttgtcagtgacaaatggtaacctcaaatgtgtttgatactgcttcatctcttggccaaacagcttcgttaaggtcgaatattgcttttcctttgtctttcatcatattgatttctctatcacttctcacatgaacttcaaccaattcgtttccctaaaaatatgaaaatttaactcatcaagaatatatgtttgatcgaatcataacaacaacaaacagaaatattttactaccacacattttttattcgatatgtacacttacatctaagtacaaatccttggctagccctttaccactgttactgcctccgctgctaccgccaaagatgacatgtttaagtgagcttctcaatgtaagatcattcttaactatattttcttccaaggccaaatacacaattggtacgttcaccaacccattgaacttagttttcgaaaaccaatgagccacatttccatcgatacaacttcccccagcttcttgattttctagtgccacgacctttttccttttatcgtcgttttgatacatgtctgaaaatataaaataaagtgattatatataagtaaaatgtgaaatatcacaaaatcataaaattataattctagttaaagtttttttcactagagggaggtatggttatcctcacaatctcctcttatgaatcaatcattatcaaaaacatgatttagacattgataaactgcaagtgattttgcagtatacaatatttgaaaaaaatataaattgtataggcatagcaagaaatatttataatgtacctttctcttgtgataatttcctctttgcatccattgaaaagttatggaaaattagagcccaaactacagttcctcagttttcttatgaagaagatttaaagaaaacaaaaatttctgatatgcatgtaaactgaatttcatcctccaaattcacttacatatatatatatatataaatataaaataaggatatgaaaaaatagttttttaaaaccaaaagtgacaaataaaatataaaatgtaaagttgttcctttggtttttataacaatactttgttgttgatgatgagtaagtaaaacgtatcatgaaaaatgtaactaagggtatattttaacctagatattatgtttaagccactttttgtttcttgttacaatcaatatataatatatacaaaaaagtaaaagacaatttttatcaatatatatatatatatatatatatatatatataataatgtgtaaatctgaaaaagtggcgcgaacattagaaatgtagttagtattgtattagtccccctaacaattcatatatttatattatgactaaatttgttttttacaaagctatctttgtttgttataggtactttttaaagcgagaatatttgaatttccgttaataaatacttatttttgaatgtctagttgaatgaagaattttgagatgctttttaatgtaaatcaaatttaaatttgggtctactcacaattcattttggacacaaacataattaaaaagtaaaaattaaattttaagagataagtacatttacgatttgtttccttgttgttaaagaatttaagatttatatacataaactgtttaaaaacaattattatttgacaaggaaaaaaaggtgtctatgttgactacttggcttggcagttagaagaaacgaagtgaaaccaaaatttaaagcttgacaaagttggaacattaattacaattttgtcttttttaagaagaaaaatttaacgcttatctaacatttaatactgttttatctcttttttagacaacccaatgcatgttgtaatttgctggcataaatagagtatgaagacaaaattggatgcttataaaactgtaaatttaattataatttctataaaacggctaatgcattagtcattaactggcataaacaatgtatgtgctattgtccagaactttttctatacaaattaaaactttaaactgattatggattcttatatgacacatatgaataactaaaatactaataacaaaaacatcatattaaagttttcttcctagtgaggttttattagttagaagtgaaaacaaaatttaaattttgataatatatatttttttaaaaatttcactctaaaaaatagttcatttttgttggtcaacaaataaagaacaaaaattactaattcctattataatttgttgactgcaatggatgtgtaatcaatttaaatatagagactggcaataaagtttctttattggttaagaaaataaatagctaaatttgaatttgtaggtttatgatattagatgtacaacttaattatataaagagactcttaagaaaagatgtcatgttttatactatgttaacaaaatactttatatattcaaaaattaaatttaaatagtcaaatatgaaacccaaaactccaaaccgtaagtatttaactctcacctcaaatcttaaacaaataccaagaaaaaataagaatttaatttaaagcataaaatttatacccgatataacaaaatgatttatttcctcaatttcagaagaattggccttttctacaatttatacctttttgtatttttttttgtttatcgttcttcatataaatacattctatacgatatagataacaactaaaacaaatcttctttttctctgtcaaaggatatattgaagagttctcatcgtttcataaagggcagtcgcagtgctcggaaaaaaaattgagatgacgtattagtctagagcaaaaaaatactctataagtttgtgacgcctcttgaaaaagaatattgcattaccgtcgctaaggaggtagtttccgatattttgtttgaaaggaaacacagcccatgtcatcagatgaaacccagggtaacatcgatgtcatactctaaaggtacgtagtttaaattgttgatttttttatcgttatctgggttattttaaatcggtgtgtgaacaattgtaagctttttaattagataaatcgatcaagctaagaaattttcaattaatttaattttttaaatatttcatatttaatactttggaaaacaattgcgccaaaatagtcgccaggaaattgatgcaacttatcaatcaatttaaaattttattctatttcttgtccttttataatagtgtattgtaggtttgacaaaatagttttttttttccttcaatcagaaaggtggagtcttaaattttacatatcaaaagaaagtgttattcttattttcttccaatagccaatacttttcaattagtgtatataagctttaaaaatattttaagattgcacttgaagtggatatctacgatttatatggtattggtgatcaattccatacaaatattgactttttcagatctgtatccactatgccatttactggatatttgatgtccgcatatctgctaaaattcggatatttgtttagatttttgatccacatatatatatatatatatatatatatatttatttaaaatatatagaaaaacgcaaactttttccatgatagttataatatttcataaaatatatttgattgaagcttgattatgctcaaattagactaggttttaccaaagctaaaaaaatacatagtggctcgtaagtcgtgatgcgttattttgctcaaaattagattgtgtctcaaattagactatgtttatgaaactctttcctcttgagattatttcaatctcacatgttgacctctggtttaaaatattgtaaataactttgtttgcactcattgagtattgtagaccaccatgaagtgcattaatcatgcgacttcaagaagaaacttttctttgtgattataaataacattgtttgctaacattcttagtttgtttaagtaaccaatcttgtctccatgattagaattttggctaagagaaacttcttccaatttaataaacaacggcatcttcaaattcgttgaaggtccactagtgttttcatcaacattcaagaatttcttaatgtttttcccagctaggatatactccagatactcgtggagaataacataaaaatgttaataaacatctcttatgttttcttggtataatatccaagcgagtgtaaaacatgttatgtcatcttgatacaagcaacaatcttaggaaagatcgtcatcttgctccttggactagttcctctgttaaagataactagtgaaggaacattttagagaatgtccttacaattattttatacttctgtaacattggaatcaaataccatgttggggaattgcttgccctcaagaaaaaaaaacccaccttgtaatccatagctttaaaacctctaattgctgagtataaagtcaagcaacatgatgtcatttttccatttaaagttatgactttcttttcatcaaactatttttccaatagttaaacattcattttggaagcacaaatacatgtttgctattcgagtgcttttcaaggtaaccatagatgaagttgatcatcaaatacgtcttttcagatacacgagcttgagctagaatgcatccattgcggttttcaacaactaagttgttgcatagaaagttgtatacctcgatgtgatgaggctttctataatttttatgcaaatgagaagaaaaaatgctagttactcattgttagagactcaactttataaaattgcgagtttcttaaaaatgagttttcagcaattggcattttatcatcctttgcgtaacagttatacggttatatgaaaatcattacatcgagacttagctctgcagacaaatgagcaagaacaacaagagcagtcttagtactacttgaaagatgaataacaattggaaacatagctacatagagatcatggaagcctgatgcaaacacaaagtagctgagccacaagacaaggaaagcaacatgctcaagctcatcttcagtgttcatgaatgtattcatccatgccacttgtgttacaaaacggactttacgtttctatttaatcgtctgccattctatctttagcttctcctgataatctctcatgagctatctaaaatagcaaaacaggtgaacccaaaacagataaatctaaaagcaacataacatcttcaagtgttatggttgtgtcacctcaaggtaaaacgaaggttttagtatctggacaccatttctcagcaatacccagaacatatatgtgttttaatggattttgtatgtggatgtcatgactacttcgaaaatcccagcttttctaaatggattagtgcaaagctgccattttatagtccaaaacttaaatttcgtgtttgcaagtctccacccatcgaaggaaacactagaagagatataatttatttgaggggagaaatatttgacacggaagcatagctccatatccttcaatggaggtgtggtccttcaacaaaaatacccccctcttgaaactctgtttcaccacacctccattgaaggacctgaagctatgcttccttgtcatattccttaccatcaaataaatgctctgttttcctgtgtttcctttgatgcgtggagacttttaaaaacgaaatttaagtttgggctaaaataaacggcagttttgcatgaacctacttggagaaaagctaggatttttgaagcagtcatgacatctacatacaaattagaataacacagatctcgttctaggtattgcctcgaattggtttcctgatactaaaaccttcgttttcctttggggtggaacaactataacccttaaagacgtaatgttgcttttccgtttatctgttttggattcatcggtttttgctacactgaatagctcattcgagattatcaggataagctagagacaaaatgacgaacgattaaacctaaaggtaaagcagttttgtaacacaagtggcatggatggatagattcatgaactgaagatgagcttgagtatgtggctttccttgtcttgtgggttagcaaatttgtgtatccatcacgctttctttatctctatgtttccaattgctattcatctttcaagtggtactaggattgctcttgctcctgatgttcttgctcatttgtatacagagctaagtctcttgaaaaaccatagtatcaatgtcagaggagatgagaatggtcataatttggctcccttaggacttggtaagaacgaccatcacgacagttctatgcgccggtggccgtatttccggttttgtgttaagcattatcgttttattaaagttctgccattgtcaccaaatggccaataatatacatatacataaacactgtaacattttaaagatgaaacaaacagaaaaaggcttcacgagtcttccttttgaagcagaagagacgaaatatcattaccaccaccattattcggcgtcggagtgtgttcattccgacgccggcgcttcccgtaaccactgttaactgccacctcttgccatcccccaaacgtcaaactattagcgaatgtatctttcacactctccatcacttctctctccgctggagataatctctctagtgcaatccctgaagcagcttcctcaaattccctcatacaagcaatctacaccaaaccaaagtaaacttattttgccggtttcaaatataagatgttttaaaaacagaaatgatagagattaaacttattttaccatattcatgacttgggactcgagaaacgcttctcggtatagtttggtgatactgatcctagcataccattccatgtaagctccatcatccaccacattgccacctccaggactgtccacgatgtgatccccacgttcagcccattcctcacacgctagactcattgacgtgtccaagtcatcaagccgacggttctttctgtcgcggcgttttactttcagaggtatcggctggcgtttcccaaactgcctcagacacctatctggaaaatgtaactctattttctcaaagcatacaagagtcgttttcgatcttcctagaatcagcttggctttaatgtgtggtggaatcaagttctcaaatctttcatatggacaccaagtgatctgcattttcacaaccatcaattattaacatttagagcaatacaaaattcataaggatgaactgaagggtttaccttgctaggatcaagatcgtccagttctctgcggtactcagataggtcggttttggatctgcttcctttacctttccacaaaagagcaagcgggaaacacgcttcggatttctcgggtctaccgatatccagatgaaaataactccaacactatatacatgagacaatcatatgttacatttcctaaagatattgaaatctcaactggacagaaaaccaaaactaacatagaagccaacctgtagcaaagtcaaacaaccgcaaatgttgctctgagatttaagcgacgcattaccgagcgctcggtaaagacaagccaacgcagcagctccccaagcatatctcccagcttgatcaaaatcctcaaacaaaggcaaatacttaacagagactttatcaccatcagtagtagcaaaaatggtactaccaataagatacaaaagataagctcgagtatgacatttaacaacatcgaaagaagcatcttcaggacactcagagaaagttcttttaagccaattaagcttaaccctagaacaattaacttctttattagcagcagatggtaacttccctaaaagtctaccacacatatccatagcaacctcatcaccaactttagaaccaacaatgggatctccatcaatctcaagtccaagtactaaagcaacttcgtctaaggttatagtcatttctcctaaaggaagatgaaaagtattggtttctcttctccatcgctcaacaagtgcagagatcagtgaattgtttaaactcattggaccgattttgcgaaagtaaccgaaaccagctttgtccacgaggttaatttgttcatcagtgagtttccattgatgtagcaatgaagtgtgttcttgacaacgaagtagacctcgttcctaaggtaagtaaggggaaataagattaaccctaaattcaaaatctgaaatttagcaagggaattaagaaaaaaacctgtccttcccaaacagcagaagaaacatggaggtcttgctcgtataggacagatggatcaactggtccgacatcaatatccatgtcgataacttactcaaaatcagcgaaaactaagattacataaacaaatttttgtcaaattctcaaaacacgaaacttttgattcttcaatttgggactaaacacagatgaagaagaagaagaagttgggattggaagctaaccgtaacctaatttggactcggttcataatttttcttcttggctttttatagctgtaccggttattttggtttggttctcttaaaccgactctgtttttcgtggttttactctgtttccgggtttctctgtttcttttatgtctgtaatggcatcacattcttctctaatggaagttaatacaaacaactgaacaagataacattggaagatacataaactgtcgaagcagcgtcaatctaccatacttacaccgagctataacaaaactctttcaacataagataaaatgggggtgaccctttttggatacttagatttgatgtaattatatacacacacattaaaattgacatctatgcctcctaatcaagatcaaacaaatctttacctttttactaggaatgagcaacaaaatagaacaaaacagaaatatacatgttctagagaactttcatgttcttgaatgctctatcaatctcccggaaatagcagtcgcaagagctgcagtgaacttaggatctttggtcaacgaagaagccatttgttgcaccaaaacctcttgaatcgtccctctctctttcttttcctcaactggttcaagcccaccttgaactagatcaagtttcactgtcctggacacacttgcatgtggtccggtgtggttatgtgtcccttcgtaagtggctaccaagaaagatggatcttctgcacttcgttgcacctaaacaagcgcacacacaactagggaatttaatcagacagcaagatgatatcgaagaactctttaacaaagtttaaaccaaagtaccttcttcttgactagacaagacggtgaaaacgagcatctgaagtaagctctaggagatggattatctctcgtaatcttttgcccgtatttcctccattgatatccatctttcacagtctacaagtaacgtatatccacaaaacattcgttaacaaatcaatacactcaaagaacgatacttgtagtagaaatctccttaccaagcttgtgtcagacttctcagcagcaaagtaagcggttgaaaccgtcgctttatcgttggtgatgttctcgattggtccgagactgagtccaattggggagctaacaaactcatcaagttcttgttttcgtttccccgttagctgtttgttctgaaagttaacactttcaggactctttcgactctgcaactcctccataagattattaagagcatagtacttctcacagactcttgctaacatttcggttagcttcttgttctccgaattaacccggtttatttcatcttgtagcatatttctcttctgtgtaaaatgaaaatcaccattaccaaactaagctgtaagacaaagctttgatttgttcaacttttgagcatcaccgatctaaacaaactattcaatgtctaaatcagatatgagaacttgatcaacctaatccattcactcatagtcaaaaattttgaggtcaaagtattgcacaccaaagtgttcgatgaaagaactaacctcatctttcactaaccatttcttctctacaactttagaagctgaagccgagacttctcttttctaaatcaggcaataaaatatatatgaacaccacgaataatcaccacaacctcgaaaattgaagtgaaattttcgaagaaattgaaaaactcaccggaagtttaccggagaaatgaaggtcgaacggattggtgttgggatcatagtccataaatttaggttcacaggagccaatttaatgtaacgtgagattatagcgaagaccaaattcataattgctaagagatttggtctcctttggttttatagtaactagtaagtggagagagtgtaataacttgtcaattatgagaaggttgacgatttgggtggaaaatgagggtctcctttctaattctaaaaaaattattataaatcttttacaattcttgtaaattctcataaactttctttaaaacctttaaaagtttttaaaactctttgtaaaatcgttttaaaacttttattaaatcttttaaaaacttttgtaaaatttttataaaatcttttgtaaatcattttaaaaacatttataaaatccttgtgtgtaattctaattgtgccaaaattataatgtgtattatgcatatgatagtgattgaacatagaaacaaaaatattggaaaaaaacaatactaatgaaatgtgtaaacaaaaattgcaagaaaactatttaatttaatacgtattgacaaaaagcaagttgtgtttaatacgttggattaaatttgttggcttgcatcgtaaatactaaatgcgtgtcctaaaaaattaaaaaggttaggtgttaaatcgtagtcgaattgttatgttttgttgtaatcggagaaaacaagtgtaaagatggatcaaaaatcaacaatttcggcggatgtcccatgtcgaagaaaaatgagtactttacattaagttgcattgtaagatccagaccaactttcgcttgacttgacccattgactatgccctggaggttggcatgtttaattttgtctcatatttttgtttacttaatcctacctacatttagttgcattagttaattatgtcagctaggcaaaataagatttcgtttcccttttttttatgttcattaagtttgaaagaaaatcattattttttgttttgtcatcttttttattaatattataaaataaaaatatattttccgatcttacaaaaccggcagaaaacaaagatatcttcgaaaacatagtttaaaagagataatcaaagctccaaaagaaagagaaaacacgtattaagatataaactatggaaacagaggcttaagaagaaaagctcataaacactaaactgtataaaatcaagaactcattaaacaaagaaaaaatgttgtaaataaactagttgcaggattagaattttcatactataagccaacaatctcaaaacttgagttgataaatttagacacaaccattattcgaattgtcaagttggttagggatgtgaggaaaggaacagaaatttgaatcctattcttgaaacagcagcaaaccaatttcgggctctataataaagtcatactatgaatattacaagaacttgctatttttggaaatatagagagctttgggtccatactcgatttcccagaatttgacacaaaatttcaaaatataaataaaaatacaagttggggtgtcaaaacttctaactcggattaacgagtcttgtgtggtttagagactttcttctttcgcttcttgacagatttgggtgtcttcgtcttcctagactctcgtttctcctctttcactttcttcttgtgctctttccttgcagctttcttgtcttcatgacccaattcttcttcactctcttcttcctcacttccttcttcactttctccgtcttcttcttcctctccttcctcttctttctcttcatcattcacctctattttctgctcttctattttaggaagagcatccttaagccccgttatcgtttggtatagcatgtctcctgtgtcctgcccgcttgttatcttagccacgtcagcctcagggttgttcacagcatccagagatttcggtatgtatgactgaacatcaataacaaaccagtaagattaagattattctacagacaacttcacatatcagttcacacaactggatacactcttaactaaccttcatgaatactgaatccgcgatttcatcctctacggatatctctcctcgctctataacttttcgttggacctgcccattgttacataattcattaatttaaagctgcccactgattcaatggacaatccatataaaaagtcatacattacctcttccaaatagctatcaacattttcgtctgtaattgccgggtcaactatgaagtcaaatagctcccgtattgtcatgacagccacaccatgttttttgaaaaaatcctgcgtgtgattgtcaaaatattccacacatcagacaccttataccagtcaaattaagcattgttaaaacaggacacttaccgagacatggtcacaatcttcccgtagaaagttgagtgcaagaggatggtccagatccacagattgagaaacatcaattatgtaaaggtgcccctgacaaagtcaagacaatatcattatatctgtcttctcttgtttgttcaagtgacccttgtaaaaccgaagagatccctaaagaaaaagaatcaaaactcacctcaaaataaagtatgttatactcactgagatctccatgcaccaatttgcacttctgatataatactcgcatttgaattatcaactgaaatgcagaaaaaaggatgtcagtaaagagaccataaagagatgaatcctgactgtaatgccataatacactcaggaccctctaaatgagaaaataagacatacctctaggtagcactcgcgcaacttgtctagagataatgcagcatccttgagacgcggtgcagcccaaccatccctccctgcaattatataaataaaacattcttagtaaattggattaggtaactgaaaaccctttaattcatcatttctctgtttcagtcaaatatacagatgaattagagtgaatggagaagagatgcctggaatcagtgattaaaacagcagataatgcattagagcgaacctataaactccatgactagcacatgaaggcgaagaagtataacagctggacacctaattccagctgcatgaagcctgccagtgaaaaatgtatataaccaactaagaaatcaccaaaattactgttatatatatttgaaaaaagtgaatacatctctggcttctgtttgaaaaataaggtaaatcaaactacactaactagatttcatatggattagtaagcagagagggacttccaagatttcttattctaattcacttaagtacaatacaattatccagcacacacccacaaagaattataggctacctcttaagatttctctgttctttttcagcccatgtcttcaccatcttccggggattgtgacgacagtagccatatctaaaacggtaatctccttgtacatatcgatctcgatccctgaaatcatcaaagttgaaaactgggattaagttaagagttttagaagaactgataaacaacattattcatgtaaatagcttacttaaaaaccagaacagatgtcttgtacacttttattgcaagttccgaaccgtcagattttgtggcatgataaacattagcctgaaaaacaataaaagagagtactttcaacaaaggaatccaaacagatcatcttcttgactaaatagctaaaccatcaaatatgagagtagtgaatgtgacatacttctttgcctgtcgaaatacatccattaacatcgttaaacacaccccggttaagcattctaaacaaaaccatacgagtccttggatcaagagcctgtagcaaagaacaaaacaacatcaacacattgcagaaaacacttgataaatgatcagacccgaatcttcgtcgaatctttgtgtaacagttagacctcacctgttcaactgttgcccggtcagctttatcagtattcctacttctcccaatttctgtatctctaagacttccacgaatcgcagttgtcacagaattcgacatcccaactttaactcttccttcccatccctgcatcaccagtttatctcaaatcacatttccagctacaatataccacaaagttctccactttacaagtacaaaacctacctgaacttaaaccctataagcaattcagaagctttgacaatgtttcatttgagcagagactatgagcaattcagaagctttttcaaattcaaaacatcatatctttataagtaatccagaagctttttcaaattcaaaacatcaatttgataagaaacgttacctctaaaggagaagcacgaacatgactagtaagcttctgggctttatttgatataggttgaagagaactagagttaggacgtgaaccatgtccaccgtgagcattaggacgacgagcatggagggaaaagccaccacctattagctcgtcatcgtcttttccgtcgagccaatcaagagcttcagcgatatcggaatccgatgaaagagagagatcgtcgtcgtcgtcatcgtcatgctcttcttcgtattctactaccggaggaatcgtgggtggtggctctgttactaacactacttcctccattgttttttttttcttttgtggcggaaacggtgaagtgccggcgagaatcagaagatgaagaagaattctttagtcgaaaaccctttttttttccctttaaactcagaaccaaaaacggcgtcgtttgagtaatgtatgattttaattttttttaagtttttttttaactttttggttacatgttcgacttgcattttcggatttggacattttaattgaaccagaccggacttttttgtttttgtgttgcattttagtcggctttttaaagttttttttcttaaatttgatcgattgatgtcctgttttatagagtttctctcatatacattgaatataatggtatgattaaatgggtaaatccgtaaataagattgcgaagaagaaaggttaactttttcgtgttgagagttttttgagttcatctattatgtgggtacgacatgtattacacgccacacaaatattcacctatttatgaaaacaatgatgactagtttgaatgtcaacagatctcaatgcacacataatttggttgaacaaagcagatgcaaggttgaacactctacgcgatgtcgaagaaggtttggtcttttatacttaaaacaaagatttctaattagcatttcacttgattgataacactacatgcatattttcaggtgaagagcttgagatatgttatatagatgtaagtatgggatatgaagcgcgacaaacaatactttctcaagggtttgggttcctctgcaattgtttacgctgccagtctgctgactaactgattaactcttcctttcctgaccatcttcacttttcatgtatcttatgtaatgtatgtgagaaaatgaggaatcaagaaaataacgaaagaaactatatagaaattcttaatggttttctaaataaaaactttatatcattaccaaaatatttttaatcattagatagtgaaatacagaatatgtatttcgagccaatttaaaaaaaaaataggaattaaaaagtgcatttaaaaagatagccaaattttattagttaaaaaaagcataacaagatagttaaacaaagaacaaaatcagaagaatcaacaaaaccaatcataaataaaattatagcactcatgcttcttgttaaggaaacaattcaaaatcaatagtaaggcgtcttgtagacatatggtggtggtggagacttgtaagtgactttaggagaaggagagtagtatggaggaggtggggagctgtagacgtatggtggaggtggggacttgtagtaaaccttaggagaaggagagtagtatggtggtggtggagagctgtagacgtatgatggtggtggagacttgtagtaaacctttggagaaggcgagtagtacggtggtggtggggagctgtagacgtatgatggtggtggagacttgtagtaaacctttggagaaggcgagtagtacggtggtggtggggagctgtagacgtatggtggaggtggagacttgtagtaaaccttaggagaaggagagtagtatggtggaggtggggagctgtagacgtatggtggaggtggggacttgtagtaaaccttaggagaaggagagtagtatggtggtggtggagagttgtagacgtatggtggtggtggagacttgtagtaaacctttggagaaggagagtagtatggtggaggtggggagctgtagacgtatggtggaggtggggacttgtagtaaaccttaggagaaggagagtagtatggtggaggtggggagctgtagacgtatggtggaggtggggacttgtagtaaaccttaggagaaggagagtagtatggtggaggtggggagctgtagacgtatggtggaggtggggacttgtagtaaaccttaggagaaggagagtagtatggtggaggtggagagctgtagacgtatggtggaggtggggacttgtagtaaaccttaggagaaggagaatagtatggtggtggtggggagctgtagacgtacggtggaggtggggacttgtagtaaaccttaggagaaggagagtagtatggtggtggtggggagctgtagacgtatggtggtggtggagacttgtagtatacctttggagaaggagaatagtacggtggtggtggggagctgtagacgtatggtggtggtggagacttgtagtatacctttggagaaggagaatagtacggtggtggtggggagctgtagacgtatggtggtggtggagacttgtagtatacctttggagaaggagaatagtacggtgggggtggggaactgtagacgtacggtggtggtggagacttgtagtctacctttggagatggagaatagtacggtgggggcggggagttgtagacgtacggtggtggtggggacttgtagtctacctttggagatggagagtagtacggtggaggtggggagctgtatacatatggtggtggtggagacttgtagtcaacctttggagatggagagtaatacggtggtggtggggagctgtagacgtatggtggtggtggggacttgtagtctacctttggagatggagagtagtacggtggaggtggggagctgtatacatatggtggtggtggagatttgtagtttacctttggcgatggagtgtagtattgtggtggtggggaacttttaacatatggttttggatgtggcgcgtacttagggcctttgtgttcatagctgggagaattgtaacttggggtttgaggagatgagtaagggtatgatgtcaccgtagccgcaatagcacttagaaccacaacataaactatgcagttctctattcccatggttcttgaggatctcattacacctattatgctattttatttctttgttttggttatgttagacttgaacatgaacaccctttatatagtcttgctttgtgttctcaacttgcgttcgtgtgtggcacttctaagtacattagagaacgtgctaagttgtatgtttggaaaagtagtgattcgtgaagaaaattaatttatactagattcttttgcaaccctcaatttttaaggattataagttgaagaattgtatggtacattaatcttaagctggttcttcttttgttaaggcaactggatgtgaatcggtcgtgtgagcaacatttgattcacgaccatgttttttcctcatgggcaaccacgttcatcccaaataaaaaaaaaaaaagaaaaaaaaagcgaagcaactatttacattagagttgcttatgctgtttcttctttacttttgtttttttttattattattggcaataaacattattcatctagtggcctttattaacatcattagacggaacaaaataaatggaaaaatatcaaaaaaatcgttaacttttaaatttgagacggaaaaacatagactttcgaagtatcattaaatttctaaagtttggtttgattttatgaaaaaaatagttaagttttgtttactgtgtcattttaggcatatcgataaatttatgctaacaaaaatatgacggagttaacttttcgtaacgtttgaaaaataaataaaccgttaaagagagaaacaagcacaacatagagttacagaaagtttataaggtatttttctaaatacatataagggattgttctaaaccaaacgttacggaaaattaactcccttatttttttagtcaacaaaaatttaacagtatgcctaaaatgacttagtcaacaaaacttaaccattttattataaaattaaactaaactttgagatttaaatgacatttcgaaagttcatgtattttcgtcataagtttgaaagttacctattttttcgacatcccccctccccatccaaaataacattaacacacatcatgttgttatttaagttaaggcaagaactccctgccgtttaggcccctcgcttctttgggtagaaaagaggcgggaaaaatagataaaccctaaaagagtgagagcaagaagtaaaattgagagagcgagagcgagctagaaacaagatgactcataatcatcatcatcaagctgttgacaatctgctaaatgttttctcaagagcttctcatgatcttactgttgttcattccaagctcgacaaggagtttcagcagatgtatcctgctaatgtaagcaaaattcgattcaatactttgaatccaagatctatgtaatctaatggattcaaattaaccatctttaggcgaatccgatgaagctgattcagcgaatcaagaagttgcaggaagatgtgactcttcttaaacaccaatgccttgacctattgtctgctaaacaggttcgtatctcgaagataagcttcggtttagctcgatgaacgatgcatctatgtaatttgaatcaaaggatgatttttaatctatcgcaaagaagaaaggttaaatttttcgtgttgagagttttttgcttaggctttgcaagatctgattcgactgtgactgttatagaaacgatttgtgtgtttttgttataatcaggatttgattgataaggcacagactacacttgttggaaactgtaaccttattcagaaaatgaatgcatcattaggagaatcaacgaatggcgataccgatgatgcattggctgattttaatcaggttcgtgctcttttcttcgttggtaatgcaatggagtttctttttggcttgaaatgtttgtcacattgttcagtgctttctctagctagtgcaatatctactgatactattggatagcggcaagaacattactaatgcaaaacaatccaaaattctacatataacaaaggacatgatctctttgcttttcgtttcttgtttttcaacagatcattgacgagtggacaatgcaagttagatccagaacaggtactgctcgtgtaaatgaaactgtgatatgtatttaaaactgttgtagtgttgtgttatattcctaaattatgcttcttttgtttctgatacagtgggagaaacagaggacgcagataaagaagacatcaataagatgcttttctcagctatttgtcataccaattgatgatattcattgttcatggttatgttaagacctacactaccatactgtacttcagatttttgtatctaagattaatgcataactttacaatacgttacatcacaaaactattctcatgttgtgctcaaaacttgtttttatcttgctcgattgtttggcttcaaacatagacccatcagctcaaacgttagccgaaggacgaagctttcttacaagccatttcctacgtaacgagacatccaaggccaagaacgtctttgctttcctctcatcttccaaaagatcacaagcatccagcagaagctcatcatccatgtcaggcaaagcttgcaatgcatcaagggcatttcctattctcgagtaaatttcgatctgaggcatgggtttggtgcaatcatcatcatcaccttctgtttcacacagaggcttcctcgtctctactccggttttctgagccttgcatactactatccccaacggcggagttattgggttgggtcgcttattctgctgcttgtggggtgaactaaagtcatcaactatttccatctcattgccataattttccaactcgatcataagattctcacaattgaaactttcttgggagagatgttcatttagcttgcacaaattgccataactatccaaggtcttacctttatatatggttgcatctggatgctcctgcaacatcagacactaatcacttaaaatgacttcataacaaaacatccctataatgttcggtgtaacatctttaccttgatatatgcttcccaatattcatcttctgcaacaatggtttgcttctccacatcccaagtaaagccatcaaggttgagaatattgttaatgtcgtcacgctctttcatcaacaatatataacgattctccagcatgaacatgtcagtctgcaacccgaactttgcattgaaggattctgccatgtcagcccaagcttgctctgtgaatgtctcaccaatcttattccctctactcacctgctctagcataagatcaataagacagtggtccataacccgtgtccattctatacaaggaggaccgatattactacacgggtaatcatttttctcattgctggtatagaccaccttctggaaactgcgagtatctttaaatccatctgtgcttccactttctgagaaggattcatataaatagagttacatacaaaaatatcatatctcaaagacaatgcaaaagagaagcttaccgttcattcgcacagtttctgcgggactaggatcaaaagcttgagccaaacgtgtgtatcttccatccgacgtttccttcccaaatatgaagcaaagatttggataacttggaatagttttaactcgatatgatctagcttctggatgtgcctgcacatgcttcatttgtaagcataaacatataactgatatcttaaaaagaaaaagaatgtggcatgcctgtatataagtattccaaatgtcatcatctgcaataaccatatctctccttgcatcccatgagaacccattttgctcaagaagaaactttatgtcgttgtataacctcctcaaatgtttgtaccgattcttcaaaacgtctttgttgtgttgagatccgaatttggcattgaaagctgtaaccatttcattccaagcactcgttatgaaagtctgccctactctattcccattgttcacttgctccactaataagtcaattagatggtagtccattggcggtgtccaaaatatccttgtacggtcagaattctgctcttggctggccttagtctcacttgtttgtgcagccgaaccatcatctctgtgatctgtcccttgctcagcttgacaggcaaatattgtgtccaaatcgttgtagctcggtaaagatttcatcctataagttctcgcaagcgggtgatcctgcatcaccacatctagattaaaactaatttagtaaagatcaaaacttcttgaagaagagatatattagcctaaccttgatgtaagaatcccaaacggcatcatccgcagatatcattagccgagtttcatcccacgaaaacccgtcttctttcaaaatagcttccatatctttatagtacttcaacaacttattgtaccggtgcctcaacacccttttcccatactgaccactaaatctagcattgaacaaaacaagcatatctatccatgcttgtttactaaaagcattaccagtcttgttacctctaccgatttgatcaaccataatctcaacaaagtattgatccatttccaaagtccactcagttttcgagctttctttacccgataaaacaacactttcacctacaaaaaaaactcgcattgtaaccaaccaatccaaaaactaagtaagcattaaacaatagttttggtaaaaacacaccattgatctcatcttcaatctctaaatcatgacttgacatactatatctcccatcagcaacagtatacccgtaaatcaaacacaaatcactaaaattcaacaccggttttgtcttataaacacgcgcttcaggatgagcctataaaaatcacaaaccaccagtcagaatcatataacgaaaacgtagaaaactctgaactttttttataccttaagatacaaactccaaagactatcatcaccaatcacagtttgatgagtctgatcccaaacaaaaccaccatgatcaagaagacacttgacatcattatactgtttccaaagattagtataccggcttttcaaaacgtctttatcatactgtgacccgaatttggaattgaaaacagtaagcatctcgttccaagcttgcttattgaaagtgtgaccggttctgtttcctctgtgtaaatgctctaacataagatctataaagaagcgttccattgttggagtccaatacgttcttgttcgatcattgcaagtggtttggttactcatcttctaagtgagaaacacacaacgaagaagacgatgagagtaaggaagaaacagagtaccgttagttagctgttacagttgcacgcggcggagagagggagagagattgggcggagtttggaagagagagtaaacctaatcctgaattacgattcacgacatcttctgtttggctgcactgtttcagtgttttgtctctctctctctctgtttttttttttttatattatgggccttttgtattattgggtgagccttttaacttattagggccttatcggatccattataaacatatattttttaattaaaaaataaaatgaaacttataaatgaaattaaatatttacgaataaataatatcattgtttttgtatataattatttatctataatcctgttataattgaatataacgattttgttattttaatttagttgaattattttagatatgatatattttaaatttctaatttattatttaaatactgaatgttacaatacattaccgtaaacataaaatagataactatattttgacagctataattttattaaaaatgattataattaaatacaaatgaagtcacaatttcttttatgtttctttaatgtaataaccaaattttatatactcttgcgttttactactttttaaagtctttgtgttttcattgtattttgagtttttcgtcgagtttagcgtctacaaaatgtttcaagtatccgtcgagttggttttgtgacatttcaggtgctacaacagaaatagagaaattttagagaaaaaggatcaaaaatgttcaaatagtataaataatatgttaggaaagttgactaggcctgatccactagtcctttttacttggcgagaaggggcaagtgaaatactttccagagtcaaatatctgtttttgaactggtgtattccggtcgaaccatatcggatttatttaaagaacctagtaagagttgtagtcttcatccatgacaaccaatcagtgtccttgacaccaaatcggttgaattgcatggaaaagatttccttcgcttccagtgccgaatttgtttgtggcagtcttgttgacaacgagagaatgtagcactcacgttcatttcgcaagatccagctagctcatgtgatcaggtcatatcattccatgattatattgcattaaagttgcatacaatcattccttgcaacggcttaacccatcatgatgttggatagctagcttccttgtgcattatgtccatggtttggaatgcattggtcctccttttcttgtccatttatccattcataaatatgtcttttgctatcatcattaggagaacttctagataatttatcgaagatgagttcatgattacgttactttcaaagaagaatgttaacaaacatagtgactaagtgagcgtgacaaatatagttttgtttttctcccataattctttgggtgacatttttctttacaagtttatttgtaaaagttaaaatgttattagtagtaaaaaagactacagctatatgccctcatcaaacttacggacatttctctagtaaattgtttttgttcatatatataatctacaatgaaaaagaagaaagatgaataatgaattttagatgcttggttacaagctgcttttatagaatttgtttataacttttacagatttattttctcgctttttagatattccctggacctccataatatatggcatttcttatcggtaattctacatagatatcatcatatactttataaccacgagtgttatccgaaaatgcctctctatgctttatccgctcaacactcttgaaattttcgtcgactatagttatattaaaaatgatggcatcatactctatatgcgtttctggaaaatgatcattcctcatctgtggactcggtaaaaatgcactatatacttctcctccccattcgatattgttggccgaagtctctttaaatttttttgctggccaatacccaatttcttgtcctcctaacttgagccaccaatcaccattttccttattctttaatcaattgtcacaaaaaaaacaaagacagatcataataatataatgatagacagaacatattttgtatgatgatttaattaaaacaaagtgttatatacgctgtataaatttggaagaaagaaaatgtagatagggagaaaaatcattgggtatgattcaggttggctattttgtaacctgttcttctaccgaaattatgtgaaatgatccaaaatatctgataggataggaatcaaatcggtgtgaacctctttttttagataaatttgggtatccatccgataatcgggtgatacatgcacaatcttagtcgataccaagagtaattaagatttatatttaacagggtattttttaggattcgaaatctattctgttttgtttttgaatcaaatattttgttcagacctaggaaaggctaaaaactttttttaaaaagtggacttgagttttttttttttttttttgcagaaaaaatcaataaaattgaatcataaacttgtttaattataactatagatgataaatacaataaaatgaactatttcttgataataatatcataaaatagaaaggaagaaactgataaccaacaaaccttgagtaaaccaaattcagaagagaccattgttcttgaaccacgaacacaaggaggacctaaatccaaaccaagagcaatatctgaactgaccattataatcccagctggacacatgctgttataacattggttttcaccaatctgtatgattaaatatattgttatgcatagaaatattttgtacatcaaaaatcttttagaaaatatgataggataactggataagtaattatatattagacatacatataatgataatatacttactttcgtatacacataacttcgagtcttgttgtcagaatataacttttgattcacctgaaatagaaataattttatagtaatatattaaagaaactatatcaaaaatttagatttttttgaaacatctacttatcatgattttttttaatatatattatttagagtacacgtacgttcaaatcaaatataagataagataacaaaacttacagtccaacctgcttgaataaaatcatctccaatttgaacgtgcatacgagcagaactatattgtaaaggtttaactttaggatcatttatagaaagtatcattgttgctccattgtaaattttccctattatcttcttggtacgggacactgcaaactaatcatcattaccatatacataataaatattataatcaatatttagtttatgagtttgtagaatagtatatatgtgatattgaaatataacaaagatcagaccacttacatgatgttgattattatcaacattatattgattataagtaaagttccaagaacctcgagggttataactattagagaacaaatttaatttcaagagttcgtctttagcaattttttttataggtacggtaccaattggacaccctatgccatttttccacaagtaaccaaactttctattacttgctcttgaggttcgtaaggatgatggccgacgcatctatatttaccataaattttgtattattgattgtactagtgatcaaattcacatactatatatattaaatatttatatatatttttactttgtaatgaaataaatgatttttcatcaatggatggtcaaacgcgggttgtttgtaaaaatctacgcaatcatatgaatcgccatgtatagtctatcatccaaaaacaaattagattagaaataattttgtaaactttttatatcattgtataagaacatgtattaatttatatgtacaattcgacgtaaataatatggctctagagtttaagataaaaagtaaagggaccttgataattttcgtagcaggtttgttgacgactttaagttgctcttcaatttcaaaatcactgaaagtttgtaatatttcagcatccacaaaacgataaaaatacaagatataacccaacaagaatagcaacatcctccaacaactcattttcatattcgttaagaagagagttagggtaaaaatgtaagagtaaagagatttttttttttccatactactatagtaatgatatatatatatatatagtaataataaaatatatgagataaagataaacataaagaacattaatgtttactagatacatgtgactttcttttttcaaagttaaaagtatataattagttctatataataaattgaaataaatgagagaaaaagaaacttaaaggatcacaccaaaaatacaatttttttttaaaaggatactactgtttagtagatatttgtgactttttcatcaaagtttaagtaaaaaaatttaaaggatattaatgcttaatactacatgttgttcatttatttatgtgttatgctacattgtcaccgttttcttttaacttctacatcattaccatttaggctatgatcaccaattttaaatttgagtttatgtattaaattattgtgatagtgcattcaaaagtataaaatattgtgtaaattctaccaaatttttattaaatattgtctaatattctataaaatattgcaaatacttcctcctctttgccttgactcttcacgacacttgtaaaatattgcaaatacttcaaaagatagagagatgttcaattctctcattcattctgttattgcaattcttgttatctcaataaacataagaggttgagcttaattaacccaagaagatttgatttattttcttgtgagtcactttgaaaattcataccccggtttcagcgtcttggcacatctgtgaagggaaatacttactggcttgcttctagtcgacaaataggtgttatcttactatgttttgatttttcaacagagagattccagagtgtgtctcttcccgaggatgttcctcgttcttattgtttttttagtcaaactgatttcatagatatagaaatgatttagtctccattacaagagtaaaacacatcactaaaaacagaaagaactgcaaatacaaacgcattataagagaataatgcaaaaaacaaggggataaaccggaggtgaaggaagcttaaaacaagcagaattctccctagctcaacggtgacttcgagtaacttgaaagattttacactgaactgggagtccatgaacaattgcaaaaccaaagagtcttcattccacgccaacaagagggcgttattcaatgataaggcagtcttcgctacaatatcttctgctaccaacgtgtaggtgctagaacgataagcgacagaaatgtctcgcaagggaacttcaagggttttagaagatagcatgtccaaacaagatgcaacagcaaatccacaaacaccaaagaagctttcattccctgcaaataaagatttcccaacaacaggggaacttgatagaacatagatctccataaaggagtaacaatggcaaacaaagcacaaccacaaacaaagcatacaattagtatccttgtgaagaccaaaagcaattgtgaacaagcgagaatcacaattccaactccatgagttagctgaacatttacccatctcaactttagagaacctacaaatcatatagacatgaaagaaggaactaaaggaggcataggagccataggaaaacctaatagcttcaggaaaaaggctgcatactgcagtaataggtcgcactatggcgatagaagtgtcaccggaagacacacggatctagaaggtttatcatagaaaacacttgcatataatttataataagcctcaatgacgagggaaaggagatggaggatccaacaaacaaggaataccatgagggagacgatggaaaatcgctacaacaacgaggaggaggctctggaggtaccggatctggaggcaccggaggcttgggaggatccagcgatacccgaaagaacagcatccggaggtgagcggtgttcacagtccaaacggaggagctcgacgacgggagagttgagaacgaagcaaccatcagagctgaattactagccaaagactactcgcaggcgacaacgggttccgacgaacgacgaggatctgacccgagaaggaagagcagagcggcttcagaaggaagaggataattgagcggcggagcagcggcggcggaggtccatcttgtcttggagcatggaggggcggcttcctcggagatcgtgcccgggagagaagacctagggcgaactctctttggttaatatttaagatcgcctcgttcttattgttttgcgactttgtcaatgactagagaagcgcaacaactttgtatatttgctgctcagagctctgaggtatggatagcgaataagatggagagtacgaagccatttcatagagcaagttcctgacagtgtcgaaatttgatgaccgctatcatttagggttatgttttgggttgagtttcttagtcgacatagagaacaaagttgtagtgtcttgtaatcaccccgggttctccaacaacgttttacaaattgtgggaaaggataaatacctacctgaggatcaacatggtgccgaatctcctacccctccacgtctcctcatttatgttctaggtttggttcaaatccagcaaggtagctagttcttggaggtggtggtttgtgcatttttttatttaaaatgtcaaaataatatctaagttaggatgcctctctcttgataaacaagcatagctataggccacagccactacacacgacacaagtcaactcgagccaagaacaactctacccatgaacagctctccctcaaacctaagacttggcgttaaagcaacatattagtcgcaagaacgccatgccgaacagggccgaagtcatacaagtgatgataataatttagaccgggagaagtaagaaagaatcaaagaagacacacattagcttctatgaattctgaatgttcatcataactatattcttccaaatctcataacgcaaaagactaaaattaacaacaacttggaacttgtaagataatttacaccgaatccaaaactaccagtaagtttggtgttgctcagatttcagaaaccatcagtttttctttcaccagacacaattagctccaagtatttgcaagatatgaaagacacaaaccaatctttatatcctctcatcaaatacatatgagacttaaaactcctaaaatcctaatcatcacaacaaagtaaccttttttttttggtaagcacaacaaagtaaccttaagatcagaatatgaagaccactgagaacacgaaatccccgatttatttcatagataatttggtacttatggtaattgtatcaaaacgatcagatccaaacacgaaatcagaaaacacacaacacaaagatcctcacacacaatagttacataacatagtgcaatctcagaagagagacctaagagacaacacggccaacgacaggatacttagcttcaaatttggtctcccaatcattaagagtattgatctctttctcagtgagaccttcaagagaaggagacacatcttcttcgttcttactcatcttacccaaagctctgctcgcgtcttttccggcgaacatcgagtaatcgcctccggagccgtagaaggattttccggtggtgacatcgaacacacggcctttgattgcgacgtagatcggctttgattcgtcggtgccgttgtattggcttagctgctctgcggtgaattccatctttttctttaaagctctgatcaattgtttctggaaagaaccaaataaaagatagtgagagatatataacagaggatttttttaaaaaaattataactgaataacttttttttaataagtggaacaactttttttgtgtcggtaataagtggagtaaactttattcttcagatttttacaaggaatatcaaaaaatattttatttttctctaattaaagtcgataaaaattccagaaatgcttaatctttcaaggagcttaatttaagctgcttaaacaacttcgtcgggtttaaaggacggctttgggaaaagacaatttaatttgaactaattcctaagatagaacacatttgtatgtttattcctacagtagaacacatcttttttttattactcagatgttttcagttattgtgtaattacaattaacacccctaattagttttaattaattattattatttaattcgtttttaactaaaaattaaatgaaaaaacagtgattatacatgtcattattccatgtcattaccataatccacgtcattaattatctccaaactccataacgtttgggtttcttatttcttagctttactgttcatcatctcccaaaaaaaaaaaaaactgtcgctttcttccactttctctctcgacggaacgaaatcgatttctttcgccgttttgctcttttctcgtctgttccggccgaaattcagacgccggagtcgcatttacgtaagcgcgaagtcacattcgacatctaagttccggtgagtatctttcaatgaagtaagactctgacatctaagttcaatctcaagtgattcccgtcactgaaatcgttttccgatgcgtaacgatggtttttaaagctgggttttaacgtcgacgttgattgacatatggtggccgatttcttagatctatttgatttgacggctgagttactgtttgtttgccgactgatttatgatttatcaattcatccgtgtctgagttttttttatgctgtgactgagttatggtttaaccttacatcgatgtctgagtttctgttatatgacggctgagtttgtttatgttatggctgagtttctgttttgatatagctgagtctggtttatgttttaactgagctgttgttatgttatggtttgactgagtttctgttaaaatatggctgagttagatttatcttatggctgagttatgttatgtgtggctgagataggtttatgttatgactgagttatgttatctatggctgagataggtttatgttatgactgagttatgttatctatggctgagttagatttatgttttgcctgagttatggtatctgtggatgagtttgttttatgttatgactgagttatggaatgcttacggctgatttatggttatacagatgtctgaagaccaagcaagggagtaccctccaagactttaccaagagggggattctaatctggagggtaaaggcattaatcataatataaagctgggagagttccctgcaattagagaatcaataggagaagaaatatgggcagaactgaaagagacagagcttggattaattgctaagcttgttgatagtcattttctctggtctggtaagaccgtacattatctactatgcagacagctgagaatactgaagaaggagctttggtgtatcgtggctggtaaacccatccggtttggattgaacgaatttcatcatatcactggtttaaatatagatgatctgcctacagaaaagtttgagcctgaagctgactacaaagcgttcttcagtgaattgcgtgtgccaaccggtgaaggtcctaatctagatgaacttaggcagggcttagtaacgtgcagagcttggcctactgaaaaacgtagatggtttgggttattgactcttctatccattggactttttggcttgcatactaactctaggataccatttgagagtgccaaaagagttttcgacgacgaagccatgaagacttatccatggggtcgggcagcatatgaagcccttgtcgtttctataaagttgctgaggcctattggcaagacgtacactgtcagtggtctggttttcgtgttgcaggcttgggcgtatgagtcaatcatcaccatcgctgagcgttttgggaacgctgttaacgcggatgagattccgttgcttagatggggtggcagccgtacccgttcaactatagaatcggtcattgctgaagatatcaaagcgaatggtggtgaggtacggtttcggctctgttatgttctgttttttatcaaatatttatgttacggctgagttaatgttttatttttctctgtgaaggctgagttatattctttttttttggcaaatatgttatgtgacgactgaattatgttctataatggctgagttatattaagtgacgactgagttatattaagtgatggctgagttaaacatactgatgggttttattatctctcctgttgtagctgcgtgttcgtacaatggttgaaaaggctgagttaagcgagctgtttcatttttggccagaccaattagaagacccagcacttgataacttgatccaagacttacacgaggttaagcttgttaaaggttattgggatgtgaagacgagtgagaagaagaagaaactcttaaaagataaagaagcggaggtgtctgaatctcccgctaagaaacagaaggtctctcacggtgagcatgttgattctcttgagaaagatgcagaaaagaagaagaaggagaagaagaagaagaaggaagtagctgtcgaatctgatgaggacgaggatgttcgttctcgtgagcaggatggtcagggagaccagcagtcgctcgtggatgtggtgtccaacttgatctctcccttaaactctcgatttgacaccgttgatactagcataaaagaaatgtcctcccgtctggatgtgattggatgtcaaatcgaatcgagtgttgaagcaaagtttgaaggaaggtttggatcgattgagaacgacgtcaaacagattaaagagcagctgaaggccatagctgattcaaaatcaagcagctatattagagatatgtttttatccaaaccacagccccaaacgcaggaagacaatcgtaaggcccaaactcaaaagacaccagacgttccaaagaaaattacaaataaccaatctgctgctcctagtcctcctccggtaaacttttagttagttatgatcgagttaatatctgattattattcggctgcgttttaaattttagttagttatggctgagttatcaatattatacggctgagttatctgaatattttacggctgagttatataaatattttacggctgagttataaacgctggttagttatggctgagttgttttcatgttataaatttagttagttagttatggctgagttatatgaatattatacggctgagttaaaaatttaattaggcatggctgagtttagttagttacggctgaggtatatgaatatgatacggctgagtttagttagttatggctgaggtatatgaatttgatacggctgagtttagttagttatggctgagttatatttatacataggtatgagttttcgttgtttaacgcctgagttttcgttacgtttatgcagtcgaaacaagctgatgttggggtaagtaggaagcttgaagcagaatttgataaggtctccattgtgtctgatgtggatttcgttgagactgtttctcctctcaatcgccgtttacgctctaggaagccaccatccccaaatgtgccaaagcacaaaaaggagaaaacattaaatgagctaatccagaaaccgccaacgagaagaggaagaggaagaaagcctttggagcagcctaaaaaggtgcctcctactgcgctaaagattagaataaataaaccaaaaccatctgaggaaacaaagtcaaaagctgaggaagctaaggaaaaagctgagttagattcggatgtagttgatgtcacggataaggttgtatccgagtataatgaaatgcttcctgagttgatgaagatgaggaggaaaccgagaggctaaagagtgtaaaagaaattcggctcaaaactgttaagctggccccggatgggagctcattgattaaccccgaagatatgcccactcacacttttccagttattggagacaacgggctgagctgcatgagaaagggttgtctgccttcacgagcaatctatgatcctctggcaccggttgatccggccaaactggagaagcttaaggcttatttgacaggtcctgaaaggtatggccctttatacgttactaagttgttaaatacgacatgtttacactatttgtttatattaactttctttattatgtgttagcaaacaatattacgaaacatatgggttcgacgatgtgatgttctactctgttatcatggccgaaagaaaggactggccagacgagaaacatggatggctgtatgatgatgtaagttactgttatgttctgtctgagtttggctaatgttatggctgagttatcgtgtcgttatgtctgagttacagtagataatggctgatttacgatgtaacttattgttatattctgtctgagtttgtctaaggttatggctgagttatagtgtcgttctgtctgagttaatttagctaatggcagatttatttaggtgttaaggctgagttttacttggttacgtctgagttaatgttgtgttttgtcttggttttattttttgtccagcacattgctgcgtatgtgaaactcctcaccacgaggctcctgcgagatcctaccccatactacagcgaacgcgtcatgattctagacccgtggttcacgtcaatgtggacgaaggattacgcacagtggaagatgaacccgaagagggtttctttcaaaggttctacgtatgaaaaatgggtcaacggtacgggtggagacgacccgacaaacaagaagtggataacagatgtggatcacttgtatactatcctccaaaccggaggtaatcattgggtggccattcacgttgacttgcctaggggtcacgtggactgctatgattgcatcgtcggatgtcatacaccggaaagcgatggaaaaatccaggaatactgtaggccgttcacgaggatgattccacagatcatgagcgaaattatccctcccgcaatccgtgtcccgcaatacgaccaattttcattccggcggagggaccttaaaaaggtcccgcagaatactatcaccggggactgcggcgtttacacgttacaaattcttgaatgtttattgcttggtgtttcttttgaaggcattaataattcaaatatccaggggctacgggttagaatggcaacagagctctacgatgaattacctaacagaatgcccgttcgtttttatgagacctgaattgctttttcgaacatgtctgtgtcttttgggatttttagcatgtgattgtactaaatattgacacgttaggattgataaccagaattatgtccgtatgaatctattattatgttaattataacaaaaaccaatgtaatggctgacttatcatcgctcgattcgtttcacggctgatatatgctaacgtgaaggctgacttgtcatcgctcaaatcgtgctacacggctgagttattgttgtttaattcgatgtttagctgagttattataacgcggtggctgacttgtcatcagacaaatcgtttgttggctgagtttgtataacgtggtggttgacttgtcaaacccaaacttccctcccatcaaataaaccagacgtgactttaggactatagatacaccggtttacgacacccgaatagtcaagtatccaaacgtcgttataggaccaaacgtcgttacgttagagaaccaaacgtcgttaggttagaggacccaacgtcgttagaggactatatatacattggtttcctcttgtcttttcacttgtcaattcttagcaactacaactcttcattcttctcttgtcctttctctgagaaagaaaaccattccgagatcatggatgcatccggttcaggttcaggttcaaacaagcggcggtgtgtggatgacggtcccaacaaggggccgtctgtggatgacagccccaccctaaagctgtatgaacaggagaagcgtttcaaatgcgtcatctcttacatcaggagcaacataagggagacggaggaagcacacttgctcgatatcaaactgcatgagaaggaagcggaacttaaggtcttaaggaaagtggagaaattgggggacggatttaacgtgaaatacaagatcgagaaagtgctggcgcaggttggcaaggcctacagagcgcagcgtgaacgcccggtgagtagtattgactgggacaaactggggtatggatcgaccgaccgtccaaattcggagtctgattaagaatgaagatggcgatcgacgtgattgtatcttcatttattattttcaattatattatatgtatgttgttggattccagtactccttatcctatgttatcatgaactctgtcttttcaattttcaaacttcactttttattttatactcgcgtgtgtgattcgaaaactttgtctttcagatttatcgtatattaacttgatgtttggctgagttaaacatgtgactcaatcattgttattctaacgttaaggcggacttatcgtagattaacttgatgtatggttgagtgaatctaacgttacggctgagttattatattttacttcaactttggtagagatagtattgagttgtggatgagttagtctaacgttacggccgagttattataaatttaatcagattgtacgttttggctgagttataatcgcacaattcgctgacttaatgataatagacagtacaaagaagttcaaattgagaaaaacagatctttctaagatcacagatacttgttcaggctctcatacttcttctctagcgtttcaaacttcttttccataagaaagatcttttccgcaagagactcgacgcgcttattggctgcttccaaatccttcttcatctcagtcgtctcctcttttatcatgtcaaactcgtcacacaatgcaacagtccaccatctcttgaaaccgcatccttgaccgggacccttataaaaaaaccagtaggttgattcatagggatacaaaataaaaaaataaaataaagaatattaactcaagaaaagatgcttacatccgatatttcgtacggacaactgaaaaaaagttttccggttgtaacaggatcaagagaagtgacaacgacaaccttagcattgcaatcacactcgatcggaacgcccttatcgcgcctcctgttttcgccgtacctcgttagcgtccttatttccatacggtcgagctcctacataaacacaaacatgatgtactcgacgttagatgggcaacgatttgtactattcagatgtggagataaatacctcatcaacactagattcgcattggaaaagagacctctgagccatcatcttcactgcaattagtatgttactaaagcactggttctatataatcctgtctgccacaaaatgtactaaccaaacgacggcgtatttgtattggctgaataaatttcgttgtggctgacttgtcatatcattgcggctgagttatgtcgtcataccgtagtatgtcactacttagcgtgttgctttgggttttgtttatcgagattatttattatatcattatcgagataacaaacatcaactttatggggaaccgccagtaatgatttggtccacatgcacaggtactcacgcccgcagttaatattcaaaataattcaaacgagttcgaaattattccttaactaaaccctccattaatcaaataacgttacggctgagttattcaataagatttcgtgttttggcagagttatgggataccatatgttattatgatatatcaaaccagccaccaaattgttggttatattattagcttgaagatgtgcaatttgaaaacagaaaataacttttattttcagcacgtgtcgattgacaaatcatggtctgtcaaaaactctaggaagtatgttgttggatatagtatgatgttggacaaagtaggatgttgaataaagtttgtaggatatgacctagtttcacggttcctctatttggaaagtggttatgatatgttaattacttgatcttcgcaactgttggctcaagaaaagcaatttcagggtttggccgagttataacaaagtgatggctgagttattcctctattgtggctgagttatgttagaagatttccattgtttgaactacataagagaaaaccaaatgttattatgagatttgaatacaagcattactgttggttcgatcgatgtcatcaaatcagtcagaatattgctgtgttttgcttttgctgtgtttatcgagaaacaattattgtgttattctcgagattaaaaaaaatgagttaatagggaaacgcgaataatgattggtttcatagatgcacaaacacgtcaatattcaaaattattccttaactaaaccctccaataatctaattttctgtttcgacgtggaatcaaataacgttacggctgagttattcaataagatttcgtgttttggcagagttatgggataccatatgttattatgatatatcaaaccagccaccaaattgttggttatattattagcttgaagatgtgcaatttgaaaacagaaaataacttttattttcagcacgtgtcgattgacaaatcatggtctgtcaaaaactctaggaagtatgttgttggatatagtatgatgttggacaaagtaggatgttgaataaagtttgtaggatatgacctagtttcacggttcctctatttggaaagtggttatgatatgttaattacttgatcttcgcaactgttggctcaagaaaagcaatttcagggtttggccgagttataacaaagtgatggctgagttattcctctattgtggctgagttatgttagaagatttccattttttgaactacataagagaaaaccaaatgttattatgagatttgaatacaagcattactgttggttcgatcgatgtcatcaaatcagtcagaatattgctgtgttttgcttttgctgtgtttatcgagaaacaattattgtgttattctcgagattaaaaaaaatgagttaatagggaaacgcgaataatgattggtttcatagatgcacaaacacgtcaatattcaaaattattccttaactaaaccctccaataatctaattttctgtttcgacgtggaatcaaataacgttacggctgaattattcaataagatttcgtattttggcagagttatgggataccatatgttattaaaaatattctccgctacgccagatacgacgtcggtttgttacagagtctcttttattgaccagatacgtcgtcgttgtgacaaaaaccaaatgacacactaataaatcacctaaacagaatcctaagttttaaaattccaatttctgatttcagatccggagctccttcttgcttttcgtctccgaatttcccagctaaaaattaaagatatgagtagcaattccgagaactcgattgcgagtacgcaatccgtcagccgttggggacgtgggttaccatcgaagtgtcattgcggattagacgtggtcatctatacgtcgtcgtcagcaaagaaccctggaagaccatacttccgttgtcctacgcgtttagatgtaagtatataattgatttgagggttttattggtttcgttgttaattgcggatgtaattgaatatacaggaccatctgtttaaatgggtcgaagatggtacatacgaagtggttgtagacagttggccgaaattggccggcttcgacagtgagttaagcgcggccaagtccgaggtttctgtcgagctagaagcgttacaggcgatggtgaaagaactgaaggaagaagtgatgaggagcgaaagagaaaaccagaaatggaaattgatgatcaaactttgctgcttttgtcttgcctttattatcattgtcattgtttttggtatcttaatgttcccaaaaatcaacgaacagaggctttttctgggctactagtttgttttatgtttgtatgaattgtttgctactggaatccattatgtgtttgatgtttatctcagcgtatagggttaattcgtttttttggttcaagtagtagcttgcaatgaaatggaactttgtcttcggccaagctaatccaatatcgttgactgagttatactggtaatgttgtggctgagttaatcatacgctatggctgagttaatatctgttgtgtcttctgaaatataggttacggctgagttattataatgttgtggctgagttaatcatacggtatggctgagttaatatatgttgtgtcttctgaaatataggttacggctgagttattataatgttttggatgagttaattatacgctatgactgagttaatcatacgctatgactgagttatgataaaatttaacaagtaacctcaagcgataaacactgactttactgagaaggcgatcgtagataatattagatataaagccatcataaaacatattgagttcataggaatgagataaagggacgataagtaagagacacaaaagcattcaagacatgaaaccgacatcatccgggccaaattcagtaaacatgtccaccaaatcattccaaactgttgtcgtcatccacctcggcttatccaaaccacgcgcccatccccgtttcagcgcccgcatattgtcccggtacaacgttctagccaccaaattaaactgcgtccacaccgtcagcgtgtgccttgaatcccaggtgtgcatacgctacaaagagagcaaatagtaagaatttggtctacggtttacaggaagtgctttatataaaaactcgatgcttaccgtggggaggaaaaaccaccttgccttgaaaacaacaggaatcatccggtacgtcggccacgcatggtgaaagttgcgctggagtatatcaccaatcgcgacagctagttcgtgattgaatttgaaccacgtaacagtggttttgtcgacccatgtacccaatccagggtttagaactgggagatctgcacgatcaggagcggtgagcacggcttcaacatctcttagaaactgtccgtcgatatgaggcaccatgtcgttaagatgtgaggatgagacgtctaaatgatgagttcaagtaactgatttatagaaaagaaaagacaggtaaaggaatgcgagaggttcgtgtctgttcgtttggcgggaaaaatttccgtactacggctgagtttggcggcaaaatatattgttacggctgagttatacccaagatatataactattatacggctgagttgtcaagaaaaaaggacaggtaaaggaatgcgagaggttccgtgttttggcgggaaaatatttcagtactacggctgagtttggcggcaaaatatattgttacggctgagttatacccaagccatgtaactattatacggctgagttgtcaagaattattaaaaaggacaggtgaaggaatgcgagaggttccgtgttttggcgggaaaatatttccgtactacggctgagtttggcggcaaaatatattgttacggctgagttatacccaagacatgtaactattatacggctgagttgtcaagaattattaaaaatacaagtcaaggaatacgaaaggttgcgtgttacggctgagtttggtgataaatcgtccttgttacggctgattgaaatgacattacggctgagttgtgaattaaatgacatgaagttcaatacgatttactgactaaccgaggtacggttatatccggttatatccggcccaattaccagcggtttaatacgcctataaaaacggcttctcccataaacaccagaaggctaaactcgcacaaacagaagctaacaaaatatttctttaattttcaacgactcagaatttcagcatgggttacgacggcctccgcgacttgaatccttgcataacttgctggacgatttgtgttatggttcttaggaagtacgtcttgtttatcacagataactcattcgaactacgggtcgtctttgtagatgagtgggtaatgggatcttcactcgtgatacaaggcatacttaaccttctgcttgtcttattccctatataactcaccctccaattttgttttcatagggtatccaaattgaagctataatcggaactcggttttctcaacgttactacgacatgcttgaagagaatcagtggaaagaaatcagaacttttggtgttatcgaaaactggggttttgtccgaacaacaacccacaaatacatgattgagttcatgaatgcaactgaggtaactcattccgacccaagggaaactgtattatttaacagattcacaccttatgactacattactgaagacaccagtgatactgattatttggtcggtaagtaatacgtatctaatgcaaatttcatactttcacaaatcacatgcctgtttttaatctttatttcatactcccagatttggttggtgcactcgtcgaggtcggatgtctgagaaatattacaaaagatggttgggagatggacggattcagacttaccttccagattatggacaaatagtataatttcttttgtttctttacttctaaatttctttcttttgatcatgtatttttcttcagttagcttaattgtaagactgttttatatgtttcagtaaagagaggttgaaatgtgaggcctctggcgaattggcggttgacttgcataggaaatttcgatattttcgcaatgacagtattgttattgacaatatatatgttgcactcacctggtggaagatcttcaggtatcatcctggccccaatcacgtgaagatccaaaatcatctgatgatatcagatgtgactgtcgaccccaatatcgaagaagtgcaagagttaaaaatggtcctcgagtaatggaagatggaaggaatcgggttattaccattgtttacttttcattcctcctatgtatccttcaaacaactatttatgggaacttcattttgtctttgccttcaaaattaaataactcagacactaaataacataatacgaatataactcagtcttaagcctttcatagtttatcgataactcagccgtaacaggtaaaatgaactcaactcggccataacatgtaaaatgaccgaacctttggacttccctaattccataactcggccataacatgtaaaatgaccgattctttcgatttccctaattatataactcggccataacatgtaaaaatacataccactgttgccaaacaagggaaagaagacacatacagagtacaaacagtactatgcacggcaagttttaacattgtgccctgtttctttacatcgagaacatgcgtgttccttcctagggcgtttagtctcaacggcgacttctagtgctgatttcatccttagtttcttgggcctgcctggctggttcgcaacaatcggaggcaaacacggttggtcaattacaatttgaggaacagggacttctgtatctgaaggcatgattgcaccagcgtacgcattgaccaaatgactgctcttataataaggactgcacagggatatacgagacacacccaaatgctctacagctgcgattgcatggatgcatggtaatttctctttgtcgaaaagacggcatgtgcattgtttttcatccacatttacaacatgcaaagatgctccataagctacttgaacgcgggaagcatcaatcgtttgtacatccagtagtcttgacgagttgacgcgggtctattaaagagaagagacaagaaacaaaacaaaaaagttatggctgagttattctctttatggctgagttattctcgttatggctgagttattctcgttatgacggggttatcgttattcgacgactgagttatgcactagttacagctgagttacctgtaagagtttctcaacaccacgtgtgagctgagtatgctgtttgctcgcatcatctctccgttcagcaaaccatctagtcatcatctgtcttatcgcttctaacagtcgaactatgggaagatttctggcttgtgacagtgctctgttcattgattccgctatattcgtagtcattaaattgtatctatcaccggggaaatgagcacgcgcccacatttcaacacccgctctttggatgtatgcatgtagtagaggatcaagctcttcaatctcgttgaacgcgttagtaaaatcattcagcctataacaaatcccacgagcagccaacggatacacttcaccaattgctttccctattgacttatgtctgtctgagattatcgccaggtccgttgcatcaggaataacaactttgagttgcgtaaaaaaccaacgccaagaatcatcattttcagtgtcaactacaccgaaagctaacggaaaaatctgaaaattaccatcctgagcaagggctgtcaagagcgtccctttgtaactaccatggagaaaggtaccgtcgacaacaacaactctgcgcatgtaatgaaacccagcgatactggcaccaaatgcaatgaacatatagttgaatcttccactctcatcaatttgaagacgcgcgactgtacccggatttgcccgtcttatcatgtataggtaagaaggcagttcttcaaaactactatcaggggttcccagagtgagctcccttgcaaacctgagcgtcttgtatgacttcgaataactcatctgttaacacaaacatattagttgataagtcagcctaaactataccacaactcagccaacaagtgatcttaagtcagccttgaaagtcataactcaaccagaatgtaattatatgtcagcctatatcaataagtcaaccgtaaaatatctataagtcagccagcagctaaatagtaagtcagccaaaacattgtaattacctttactcgaaaattcttagtgatgattattccgactgattttggtttaacatccggaccaacgtcaccaagatagtccctgtaaagaactcccagaacatcaggtgttgcttgtcgggatcgaccagaacgttccgtcacagaacatgtgtgttccgaatcgtatatataaacatgaaaattgggatcatttccttgtctagatgcacgaaccctccaaagacatctatccacccagcactcgtaagataactgtagtcttattagaagttggtacatcaaaatcaaacccatcccttatcgcaagaagtttgagtcgatactccaactcgaatttgctacgatatttttggcctaccgcgagtgttagcgtagacagctccaactttaaatcagtcaggctcccagcagatccgatcaattccatggtctgagatctcttcgaaggagaaggtttcgatgaatcttcgtcattattattaggctcgccgtatatagcaaagtcttcatcatcagatgaggcaccatcggagtcgtcgaaaaaatcaaaccggctagaaaattcatcatctgcttcttcgtcacttgcttctttgtcagatgcttcatcgacacctgattcatcgtcccctgcttcatcgtcccctgcttcatcgtcttgataatcgtaacagacaccttcaaacccccgacccggaacttcgaatctagattctgctcttgagtcagattcaatagggcgtttcgaaccccttcctcttgatccgtccttccgactaatatcacttgaatctttcgccgtaaactccacacagagacgtagctgctcgaatttcgtcaaacctagataacattgcaactgtcgatcattggagatataaactggtggagtatcgaagggcatagttttcagagtcttgttggagaacatgtaactcagccgtaactgatgggtcgactgattcactccgtaatcatcgatcaccgtcttgaaaagactatcgtaaactgctctttccgcttctagctgcacaactctacaccctctttcgtcggggttaaatacgaatctctgtttctttacccacgaaccggaaacaactatgaccgtagcgggaccagccatatcaagagaaagatgaaagaaattgaagatgtatgagaagatgaatgaagaaaagaaagttccggtgatgttgtaacgttcaggcggtggacacaatctgggaaaacgatttaaagcaagagacttttcgtatttccgtcgaggatgctgacatggaatgatgacatggattattacagccgacgccgttttgaagtgatgacgtggcaagtcagccaccaaacgaacatttcataacacagccatgaagcaaatctttaagtcagccgcaacatgaatactattacagtaattaaaacaggaaaaaaaacaaagttaattcagccgtggtatgtcgtaactcaactaactcaaccgtaacgttcaacaactcggccataactgcatgatattatagtaattaatcttttaacaataagtcagccataacatggctgagttatatcgtaaaccagctattggcggctgatttatttcactcgacaataactcagccgtaacatctttccataactaagccgatcaaaactataactcggccgcgtcgaggaaataagtcagcctttttctcataactcagccatattgttggctgggttattgtataacttcttataactcggccgaccatccttaactcaaccataccgttgcctgagttatacaataactcaggcaacattttacaactcagccgtaacgtctggctgagttatactcatacttcgccgttttgttatgactcatatatttttgacgtaagtcagccgcaacataccgtaactcagccggctgagttcatttaatccacgtcagcaaattctgacgtggcagtggcattccctgtaattacgttttttccggtaacgtttagtaggggcacgctgggtaataaaaaaaactcgaaaatataacagtaattaaaaaaagttctgtcgtgttctggtaataacacctaatttcttacccatcacagttaatctcccatttaattttttaccagactacatttacgtttgagttttgttacctattgtatttggattttcatttttatgcttccttcaattattgtaacactaattgttattcaattctatagaggtcaactgaatcgctttaagagttaagttttgattacttgaagactgttgactatatggtgtggcaaatacaacatgattactaccggagcttcacctagtcaacagtctccacttttggacctacagatgcactatctccggatagaaagcttctccactcttggaccgacagatgcaccatctccgggtagaaagcttttactggactgtatttgtgaccttaaggttcttttgctcaaccccaattttagtacgtaacctaacctcaaaattggccttacttttcgacgatatttagctcaactctgatctgccattcattaccttgcagctgtcgaactatcaccaacattcaatcttgcaaaagggaattagggttgcacatagtgggataattgttcaactttggtccatcgttaaagctttggcccaatactaaaagtaatggattctttttccaaaaagaaaaacacaggtttgttattttatctttatgttgtttgtttgcttgtcgttggattcttctggatttcacgaccaaacgcagccagtaatagttgataatagctgataattctatcgattgaaaattgtaatcgttggtgacaattgatataattagtcaccaaactaacaacatgcaaacaaacaattttggtcgctattgctggttgatcaggtccatagggatgagacatgatcatgaccaatatgggatggggacttggttaccatttcatatttttgacacccgttattacaagaacacatgcacaaaccttatttaatttgtctttatatgctttgctgtttatagtatttgacaacttgtgtattacttttaaagtaagatttttaaaacaaatactttattacttaataggttacattgatagtatgatatgatttataaattaatagggtaattattgaagatttgcttatgcacaattggttactttagttatcatttgatcttccacataagttttagtattatctgcaactcgttacttgaccttaccattttcttaataattaaatgttaataaattcatgtatatctaatatgattattataagatattatgtgccattttagatactatgccaacaatagtaatacaaatgtgtgcatatataaaatctgaaacacaaaagccaataacaaagaaaaacatctaaatatctatccaaaataaatgaaaaacttttcaatctttctattcgtgtttagtctttgcatgtttgaccatgtatccagctctggattcaagatcacgaacgaactcaaatccaataaacttcttcggattggatgttattccaaagatgacatattcggtccaaaaacaataccaataggacaacatgttgaaatcaattttactattaatttttggcatacaacacgttttatgtgtaatttggaacaaggacctaactataaacattatcagaaatttacagcatacaaggtttccggttttatggttgaggaaggcatataggactagagagcaagagaagatggaatctatttagacaaagaaagcggcaaacatattggaaaatcgattaatttgcataaaatgtatgattggttaaattatgtttaacaatctacctaagaacaaaaaatattttatcttatcatcttgaaacaagaaaatttaccattcttcttttccttcttccccttttcttctagtttttatcattcaaaagcaatctcataatatttggttttaatacatttcacaaaccatctctaataacaaaattcaaatttcttgaaatcccaattgtaatcataaaaactagtcacaatggctattacgagaggctatttaaaggacaatttcgattataaatccaaaatgtaattcaaatccgaattgtaatcataagaaatcctaattgtaatcaaaattttatccaaaatctatccgtttcacccaaaatcaaagaaaaaaggatcaaaccatcaaatctaatatgaaataaaatcctaattaaatacaacacaatcaatagaatgaaaccttaaataaaatcctaattaaacacaacacaatcaatagagtgaattaaaatcttaattaaacacaacacaacataatggttggatcgtaaataagtgaaaaccccttgttttatttgtcttttactattttttggagaaaaaaaactagataaacatatttttttttttataatgggagctaaatagagaatgttttaacccgagaggcccgagtagattaaaatccgaattcaaccttttcggccaagaagaagaagaaggaaatggcgatttgcatgtgttgcgattcacatcttgtaaaaaaatcgattatgaatccatggaatttgcggagtagaacgaaactagggtttgtactggtcgtttgccgttttccgactactactactttcaaggcttcggcggtggattcacctgagagttctttaaatttcaccaagcatatggatcaagcttggataatctcacaggttcgtatctttcgagagttgttgagtttgttgaatttgagtaatcacaagaacgttattacaagaacaaaatgtataaacctaatttagtttgtctttctctacttagttgtttattgtactttacaaattgtctattacttttaaaaacaaatactttatttactaataggttacatagatagtatgatatgatttatagaataaccagtttattattgaggatttttttatgcacaattgaatttcttagttatcatttgatctttcacataaggtttaatattatctacaactggttacttgattttatcatttttttcataattcaatattaatagatttatgtatatctaatatgattattataagatattatgccattttacatactatgccaacaatagtaatacaaatgtgtgcatatataaaatctgaaacacaaaagccaataacaaagcaaaaatctaaatatctacccaaaaaaaatgaaaaactgtttagtcttttttattcgtttttagtttttgcatgcttgaccatgtattcggctctggaatcaggatcaccaacgaactcaaattcaataaacttctcaggattggatgttattccaaagatgacaaatttggtccaaaaacaataccaatcggcaaacatgttgaaatcaattttatgattaatttttggcgtacgacgcgttttatgtgtcatttggaacaaggacctaactataaacattatcagaaatttacagcattcaagctttctggttttatggatgaaggaggtatatgggactggagagcaagagaagatggaatctatttagacaaagaaggcggcaaacatattggaaaatcgattaatatgcataaaagtgtatgattggttaaattaaaaatatttaacaatctatgtaagaacaaaaaaaaatgttatattatcatcttaaaactagtaaatttatacatagaaaaaaattattttctcaatcatataagcaaaccaaaaacaaacaagcaatctggattttgttttgactgtaggaagaatccaaggaattgtagaggagataatgagttggtttaaatcattgaatcaatcattttagcaaacaaaaagatccaactttaatgggcccagggtccaataacccaattgggttattcctagacttttctcctcctcctgttgtcttccaatttggtatgcgagaaaaataaaataaaataaaaataagccaaagacaaatttaaacctccgatttcaaccttctcggcgaagaagaagaagaagaagagaaaatgacgatttgcatgtgttgcgattcacatctcgtagcgaaatcgattctaaatccatggaattctcctaggataacgaagctaggtttcgtaccagtcgttcgccgttttccagctactactaccgtcaaggcttcggcggtggattcacctgagagttcttcaaatttcgccaagcgtatggatcaagcttggattatctcacaggttcgtatctccagagagttgttgatgtgtataattttgttgaatctgagtaatcacaagaactgatccttgatgtagtcatgtacgagtgaagagctatatgcaattttgtatgagattaagaacttggatctgtgatgaaatgttgtaaatttcagattatgaggtgaatagtatcagcaagtttcaaaaggatttgtatcgaaaatctgtaattgcaaagtaccttttagttggtttctagcaaaaaatgtttgttcacaattcatttgatttgtgcatatgatgagaacatgttagctacttaatcaggttgtagctgttctctatgatccctgagtgatgaggcttaagcaggcttatctcgcaacgcaatgtagttttgtagctttgcatgtacaattgttggattctctgctttttctctaatattgctcttagagaatctatcaaaagttcagactttgaagcctttcttctagcacttgcaatttgatattgagctcgtgtgaattttctagatgttacttgttgacctgtgtttcgattcaatgattttctttgtctgtttttttcttcactgcagcaaccaagtcctgttggatgttcatcgtgcaattcaaagggtcatgtggaatgcaaatggtgtgcgggtacaggattcttcatccttggtgataacatgctttgccaggttccctcaaggaatacttcatgtgtaatctgctctggacaggtttgttatctaataaaaacgaaagtgcagacacattattgtgtcttcttgtttatatatcttcccaagtatgaacaaattcgattctttcaatggttttagggttctgctagctgtagcgattgcaaaggaacggggtttcgtgccaagtggttggaaaaacctccagtgccaacataactgatgaacaaaagcaagttaagctttttggtctttgatgatttcttatggaggaaaaatgtttatatattgattcaagtggaacatgaatcagatatgcatatatctttatacatgtgttaagtatatatatgtaagttcatttattcatttccccttgttctgtctgtacaaccaaaggcctacacaagagttcttgtaatcgacacgtgagttttacgatttcgatcattggagtagctcaacggaagaacattagtagcacagggtcaccttcgtatttcttttgatattttctcgttgtagggttaaatcatgtgcatcttccttacccttgatgaatctggatatggcgtttctctaatagaattgcgattatcatcatcttagatacagtttgtgcctaacaaatccaacctaagctagttacttaatcattttcttttggggaagtgaaaatggcatttgatttcaggataattcttaaccaaagctgctaagtgaagaacttgtgtcagtgtgcattccatttcccaagtgatgaggaaatcttcaaaagtgttcatgtctagagtgtaagagggcactcgaacacagtggttcgccgtttcctccattatatatacctctactttgccccttttagttttacttgtcacaaaactttccagatacatatttactgcacaaaaactaaattattttgagtaaaaattaccaacgcaccagcaggttatttttttttattttttttacggtgtattgaagaaaatttcaaaactacataatcgtaaataagagttttattaaattttacacaattagatgcattttttcatctgatccaactttctatatctcttcttttttgtgaaactgtatttttagaaaaataatgtgtttttgacggaaaatttggtggattgatttgggttaaccccttttgacaccccttagttccactaatagtttttttatcctacacataaatttctataaacttttgtaatcagatatagtcacatacatatggtagtaagaattaactaataggctatatctgaaaatggaaaatggaaaccgtctttttaataatgagctcaacaagaggattttctagatgcttgatataatcgaaatattgaatacacctaatggcttcagaaaatataatattgtttctagttctcataatgtatgttcttggaagcccaaaaagaaaattaaaaaagatcttctccatgatctcctctttaattattgtaaatgaggtattatacgcgcaatgtcattcacgacgcacgcataaccatttgactctttgattgcgttatacttaacattaagctatagttaaatgtttagtttcgagtgttttgattggataattttaatttgcttggttcctgttcggattagtttgtgtgtttttaacctttatagattgtgttatataccttttaatctcttaaataaagcaaacaaaaaacagtaataatacataatggttagttattcgggtaataaacaaaaatatgtgacatttgagtcaataagaaccagccactgcccgcagaccacagcaagtcttttgtttttgtttttttttgggtcaaaaatattagttaagtctattcacgttttatttaagttataaagaacaaataattggaaaaaggtagtgtttcacgagatcgaatattttcttgttttttgtgcaagtctgtaatcagactaaaatatcattaatttcatcgtatgttcttaaagtattaaaatattgatcgtagcatgtggaaaatgttgattattattcttattttaaggtcttcattttttgtagtcttgcgacgacccttgactttaaatcctttataaaggcctcgactaaaatgagatgtaccaacaacacaaaacttgtactcacaactaaaagaagaactcaaacgcaagacagaaagatcaatggcgagcaacggagttaccaactgtaacgcaaacgccaatgtttggcggttcaaaggaaacggtgcaacgagtgatgcggcggcggtgacgttgagaaagcttgcttttgggatgtttaaaaactgcaccatgaacagtggaaagaccattttgttcccaactcccggcgagccctccgcccattccaacttcaggacttgcccggaagccgaggaagccgttgccgcagctgcacgctccggcatggctaactcttacgcacccagccctggagttttcaaggctagaaggtctgtttgaaaaatttcatttttctttttgaaaaactattaaaaataagttttacaataaccaatctttgaaaaaacaaccaaccaaacaaaattacatttttaaaaattgtttttataacgtaggaccgatcaacttttgtctaattagttatttgccgttttttatctcagggcggtggctgaatatttaaacggagaacttccgacgaagctgaaggccgaggatgtgtatatcaccggaggatgtaaccaagccatagagatcgtgatagattctcttgccggaaatccatccgccaacattctacttccaaggccgggatatcctcactacgatgctcgtgctgtctatagcggcctcgagattcgcaaatacgatcttctccccgagagtgattgggaaatcaatctcgatggcctcgaggcggctgcggatgagaataccgtcgcaatggtaatcatcaaccccaacaatccatgtggaaacgtctacacctacgaccatctcaacaaggtatatttgtttttctccatttagcttttgatgtatataataagtttgacatttaatgtaatataagtttttttgaagtgtaaaacaactaacgttttttggtaatatatcgactaatctttaggtcgcggagatggctagaaaactcggtataatgataatatccgacgaagtatatgatcatgttgtatatggagacaagccttttattcccatggggaagtttgcatcaatagctccggtgatcacgctcggatccatatccaaaggatgggtcaacccaggctggagagttggctggatcgccatgaacgatcctaatggtatctttgtatctacaggggtcagtcaacttctaaacactatagttttacttaaaataagattaccgcaccaattaagaagattctaactaatatatgggcctttcgttcaccaacaggtagttcaagcaatagaggattttcttgatttaactccacagccttcatttattctccaggtttgtaatctctcactatcatcgtaagctataagttttggttctctaaataatgtgagattattatggattttgataggaagcacttcctgatatattggagaaaacacctaaagagttcttcgagaagaagatcaaagccatgagacgcaacgtcgagctttcatgtgagaggctcaaggatattccttgtctcttttgtcccaagaaacccgaatcttgttcttatttatgggtactttaattctttttcttggattcttggttttctagatttttttttgctattggatgctccatattttgcttataataataaatgattagcttaaacgatttattttacagttgaagcttgacacatcaatgttgaataatatcaaaaatgattttgatttctgcacgaagctagttagtgaggagagtcttatccttataccaggtattgatctctttaacaatatacaacatcttaagaacttggggctcccatagtcatcttcttacatatgattttaatttataaatttgcatcgttaattatgatcaatctttttttatttacttatttatatttattttgtgttgaaatttttaggagtggctctaggggcagagaattgggtgaggatatcgataggaaccgacgaatcagtggtacaagaaatatttgacagactaaaaggtttctatgatcgtcatgccatctccaaggaagctatcaaactcagtggccatgccattaaccagatcgtcgtctctgtcaactgattgtagtagtcctatgccacaagtccacattataatttgtgcgtaattccttaattatcaggaacacaatcaagaaaaatagcattggataatgaaataaagatgtgtgaaaaataaaaggatatttgttttcattattatactcattttcaacatagtttttgatacattgtctatataaaattgaacaagtgaacaaaaagaaagttcaattaagagtgttcttcaaaagctctctaattctgtctaaaattccttcaagtattttctaaatgttcttccatagttttttcatatttaagagggtttctcatcttgatttatatcgggtttctcatatattacggtgttggactagtaaagaaatcttaacactagctcattaccgtaatacccgagaaactctcttaaatctgaagaaaaatatggaagaacacttaaaaaatactttaaaagtttttagagagaattagagaacttatgaagaatactcttttatttgaactttctttctattctcttgttgaacttaattacaaatgatggggtgagcttacaaaagtttctagattattctaccatcatctcgataactctactaatatatctacatttttttatcttacaaactcctactttaaggaggtgatgatttttatgatgcttatagaaaaatctagaacttaggcttaactttgggtttagtccaatatagaatattggattataaacccatgatttagcttaacccaaaatcaagtttaatttcaatacgtttgaactcgtacctatcaacgggaggtttggcttggctgcataaccgcattgaggaggagtgacgctcgttgtgtctctgtttttttgagtgattacgctctgtttttggctgtattgcctgatttgttatctttcttcattgatttttcggccgttaaaaaaaaacctctaacatgcgagtcttgtaagtaaatcttaactttaagctatatatgcatttaccattcaagtagttcaacctgataacattaataaagatttgatcccttgacaagttggcatgaatccatttatcttttctcaatggtgctatagaaacaaaaaataatttgaagaaagaaaatacagctagtaagatactagcctacaagttatttgctaccaaaaaacacaaaaaccaaaagcattattatgaatcagaaacaaccatttccattggcaaaattataaatatttgagggaccagaaggcatgttcacgtaaggagggactgtcactttgttgtccaagaaaccaaacacatcgtctttggcctcattaaacgacgccatgtttgtcacaaccgtcttcctcaactcctccaatgcatacttcatttcctgtaactgaaccatattcatctcctctactggcttttcccaccaattaatcatcgaccgcctcacactctcttttctcatctcttccatcgcttgacccttcttcttctcttcttctacctcgctcaaaatatgcgttaactgcatattcagttcgcagctcgctgcagggcttccttgcagttgctgcgactgagctaaggacatattgtttcgagacacgtagcgatccaatacagattcaacacttggatgtccgaatgagaaaggctttttcgcgggagaaaacacgatgatcccaatctctgcaccacacaaagtgcaaagctcactagctttcttgaagagaccggctctgcgtttggagaatgtgacttgccggtggctctctttctttatttttaccattggaattttttgtcgtccgatgctttctttcttcttcgacatcatagttttttttgtatggagggttttagttgcttttctttgttggaatatttggtggagagaaagtgtttgtttatatatacatgcttgagtctggtgtggcattattatgagatcaacttgcaaagttggtaatttatttttatattttgtaacatacatttgtaattactcggcttgcctttaattttatggatagataataaaatacaaagatatgtgtaagttataaaaatcttaatttggtaatgcaatgatttatctttctttactttttataattgtcttgtgtataaatggatgattttcctaatgagtaatttctttatgttacaaaaaggttgttttaatgagtgagtctgtgtggcattattatgagatcaaatggcaaagttagtaatttatttttacatttgtaacatccacttgtaattactggttttgtctttaattttgtggatagataataaaatacaaagatttgtgttagttataaatattttaatttggtaatgcaatgaatttttttcctttcttttataattgtctttgtgtataaatggatgattgtcctgataagtgattgtgtatgttacaaaagaggttgcaaatcaaaacgtttacacatgttaaagtattatccaaatcaaaatattgttttaagttgttaatatcttttcttgtttttctatttgataaacatgcattattatacacaaattaatatttaaatcttgaaaatttgaagtctaatttatagtgtctgacttggtaaatggtttccgaatcagcgagctcaatcgtttggctgaaactggaccttacaagcctaggcttttcaattctaccaaacaaaagcctcaatatcaagcttacctaacaaaaccttgcactcaaaaaggatttacgttacaatcacgagggcaataactttaactaagaaagtgagaactaaggttttcaaccaagggctcaagagaaatgcagttctcaaccccaaccaactttatcgtctttgccacacgatcaagagaacaaactccacgaaataggccaaatgatccaaaaaataccagtctgacattcaaaagccacattggagacgacattgagatttgaaagtttggatacaaattatcaaagtcttagtgagagggtaaatcaatgcattgtttgtcacgtaagggactctagacagacaatgtggtcaaacaacattggtatgtttaaatctttgggaattaaccccacaagccttggcattcggatacccaaacccgataagttcctttttgggttttgggtctgcgtgggtaagagagtcgagattcattcgatatttcaaaaattcggtgcggattggggttcatgtattttaatcgagaattaaaaatacccaaaataactatattttagtttcgggtcaaatttggatgttttatctatatatatacttaaatctacccaaaacacatgatagtcaaaaatacattaattacgttttacctatatataaccaagtgtatccaaaaatattcaaattacctttaaaaactataacattggttacattttatccaaatatatccgaattactcaaaactatctaatatattcaatttataattgtaattttggatatttggagtattataagtataaatataactaatattttaaagtgtatatttatattcgaatatttacaggtattagatttggttctgtttttttttgggtaattaggtttagaactcgacgtatttttaaaaatcggatctgaatcgattcaggtattttttgggttttcggtatcgggcattcgggtattttttttgggttttcggtttcgggcatttgtcaaatcggttatataactacaaagttaagagtttaacaaaaaattatacaaaaccaaatcaaattaaattgaaccgaaccgtatgcgaattgcaaccaaacgcatataaaatgaaaaattataaactgcaaacccggttaattttccgggtcggcccggaacccaagaagttttcttcttcctctctcgtcttctctcctccgcgggagactctaaaatcatcttcccatggcgagcgaagaaaacaacgaccttgaaaatcttcttgacattcagctaattgaacaaaaagaatctctttcctccattgacgaagccctactctctgacccatctaatcccgaactcctctcggtaaattttcttctctcaaatcagatcccaaatttcctggagaactaagattactacgattcaacaattttgtgattgctctttttctagaaattatatagtatggtatcaattagtccaaagctgtttcctttttctttgataatctcattcttagagtagctagaggtgaaaatccgtatacttagtcttatgtttcatgtgtggtggttttgtctttggttaggtccatgaagaacttctcagtgcaatcaaggaggtagaggaagggcttttgcatttaaaacgagctcggttattggaggaagctgatatagtgttgaatggtctaaatcatgatgctggagttaaacctgagcatctggagccagagaaaactgaagagaaaaaggatttggatggatcgaaatgtcggtttcgacatactgatggtcgttggtataatggtcgtattattggatttgaaggctctgattctgctaagatctctttccttacacccacatctgagagtatgatggtaagttctttgtagtcatctgttaaatgttttcttacttagttcttgtgttttggatatgatctatcagtcttttcctacaatactaatgtgatataggatttgaaaagctagggtggatagagtttattgaaagtctcagttttgattgtctatctagcttaactaggttttgctataggcatataataatggctgtgaaagactaactttgagatggttactggtggatttttttcaattgctgttttgtgtcttagatactaatgctgcaccacatttgtgcagatttgcaagttttttatgcagcagaggtgtcggtttggcagttcttgtcgttcatcacatggtatgtttaaagcatagttagatgatcataatatttatcattatcgttttgtgtgttatatattcataccgtgaccacatttagaactttagaagttagaaatgtggctggtttgtcattgtggttgataactgcaagacatcgatcggtgcaggactagatgtgccgatatcttctctgaagaactatgaacagactgagtggaagcaattgatggtaggctctaagatttgggcggtttctggcagtaaatacgatatatggagaaaggctgaacttgaatcatgggatgatgagttacaagtaggcggagttgttttcagagatgataaaagctctgcaaagctaggatctgattctttggcattatcagagtacgctcagatgactgatgatgatggggaagaggaggaggaggaggatgaacaacagagtgcttcagattctgaagattctgtttcaagtgattatgatgaagggtctccacaaggcataggctttctagaaagcacaaatctaccaagaggtgtccaaactgacactgccttatttgctaaatgggagaatcatactagaggaatagcttcgaagatgatggcaagtatgggttaccgtgaagggatgggtcttggcgtctctggccaagggatattaaatccaatcttagtaaaagtacttccagcaaagcggtcactggattatgctcttgagcacattaggaatggagaatgtaaaagcgagaaacaaaagaagaaaaggagcagaggtgggaaaaggaagcgtgggaagaagtttgcagaagcagctaaagcagcgaaacaggaagaggaatcgaagccagatttgtttagcttaatcaatgaacaaatttttcctacccgccatgagaaagtacacagcgagtctgtaaaaaataggcaaaacaaaggtccagtagacaggaaagctttggttgaataccaagatgaagtcagagacttgaagttagaaatgttgaaactagaacagatggtgaacagaaacaagaaagatctagttgtttcagaggctgcgacgagaagattgaaagaagtccgaaaggcattggcaagtacattagcatgtcaagcagctgcctcaaatgctatagtaagcaaagagaatgagaagaaatggctcaagttttagaacatagaactttaaaccagtttaacagaaatttcatggttaaactgtaagattgatggcaaacattggaaccttctgaattatataattgcgtttacaagcaaaaatttatttcatgaaatacatattgttggaagaagaggaaacatgacactatacattttcatagtcttctgtgtgttctaatgaagttattggtgtttagatttatagctcttaagcaggtataagctgcggctgagcacaatgctgctgaacctaacaggacagccttccactgtctactaaccaccagaatggccaaagccgtcaaagccactgccgtggcagagaggatatttttccagagctcaaaagatttgatcacattgctgcagcttctacaatgaataatatgtctgaagtaccggttagccaaattgggagcatgcatagtcccaattccgccttttgcagggtaagaagcagagagagctgcaatgagccctgccggggcatgttccacgacaggagggactttggggagagatatggtcctatgcccgaaatggtaaggcatcccatgaccaactttgtccatccactttctatattcagcgacccatgtgtccgatgactttagattcaaatacaagtccttagttggtactttctccttcatcagaacctcattttgagacgatagaaaccccatgtcttgttcaaaaaccttgcaggcattctgatgccagaaccattgaggtaacaccgaaaccaaaggcgatctttttgtgaccccaaacctaacaataagcatagacttcccttgccctgtaggtctacaaagaaacagccctgaaaaatagttcttcactccatccttcccctcgaactctcgattgttctgcagaacacaaggagcatcaaaccgaagtaaattactccctttcccaccttctttctctcggccccaagtccctgcgaaaccccgattacttcgctctgtgacctcgaaaaccaaaggctgagcatcttctcttttagcagtgaaatccgttctatcatgagagataggaacatgagcaggatccatcagattctctaaaagaatggaatggtcataaggaagctcatgagtagtcgaaatgtcgaaaaaaccgggtctagcgaaattctcaaaccaaggaagcttctcagggtttggaggtgtctttgttgacatccacacccacacaactccttgtgaatccttcacctcatacgtcttcacacaagcagcctttggaatcttagcacttgcaggaagctgttagaaacagaacccaaaaccagtaagtacagagtaaagagaaaatctcgaaatagcaaaaatcagtaaacaaagaacctgaggaatcttgacacatttgccctctccttcaaattgccaaccatgatacaaacattccaatctcccatcaatcaattgtccttcagacaacttagccaacctttataaaaaaaaagacaaaactcaatttcagattcctaaacaaaagtacaaaactagtggttgtggttttgctagatgatttatcttaccgatgaggacaccgatcttcgtaacaacgaagtgttccttcaccgtctttatacaaaacaatttgacgatcgtagacggtgaggccaagaggcgcatcttcagggacgtttttagttaagtacaatggataccattcctctgtccaatcataatccgccacctcaacacgtttctcttcttcagggtttaaaagaacatctccacctccttctgtttgatcagatacggcggttccagcgacggcggagcggcggaggagacgtagacgaggctttgtgggtatagtgcatgttgatctgtggttgtggattattggtgttggtgttactttagtgaagagaatcggagaagtgggtgtgagttgtagagaagagcttagaaatggaacagccatggcggattcttcactagagagctcgaatccaatgttaggtgttgtttgcctcttctcataaaatatatcataaggttgcttgttcaaccattggacctcgttccaccacatacatagatagtagaaactttggctaaacgacgtcgtttatttttacgttatttaaatgtcattttaacttctttttattttatttttaatcttttaagttttaacattagtcttttttgctttaatacatttcatagtgatgaaaaaaaaacataaaactatgttaatagtgattaattatttattcattgttgataataataacaataaaaaaggctatactatgcctaagaacagaaactgataacataattagcactagtacatgtaaatctactcgaagcataatcgtacacatagctatacgcagtgggacaagctcctttaaatatcttcgagtatttcgtcggcgggcaagtctccggtttactgaaagcgccggtgcaacaatactccggtttgttaaaagcctcacaagcactcttacacgccacaacacccgatgagccgttaacgcgtagctcttttggacaaatggcattcacgtccgaaacacatcccgcggttttacaattgcctgagccaccttgtggtgtgattttcacctgaacgttgtaaccgtcgacgagactcacgtcgtaagaatcttgtacggtgtatttctttccagaggagccgattctgaattctgctagtgtggctggtggtgctcctcttgcaccggtgcatttttacattttctggaaccagaggcgttgaagttgcagcccgttcgaccccagattcgaccagaccaacctggagaaacggttaagtttacagaagaacctgaagctaaggcaaatccgccgccgcggagtagtgtgcggtttgcggttaggattccgggccacacagtaaagttgcagcggtttgataaagtgaagacggtgccggagacaatagaaattgtaccttgaagaatatacaattaaaaaaaaattactaggacggacaacaaaaaaaaattatcagataaattattaaatcaaagtagtcatcttaaaatgttggaaatgttttatgtatacatgtggctatgatgaaggagaagaagagaagatgtaatttggagaaaatagccattgttaatctgagtattgaaaagttgaagttgtgatgattagtgaaagttgatggtgaggatcctctgtttatagtgtttttcttttctttagaaacaaatccattaacttattgttttggatactactaccataagtgacacttcatatttttattttttttacttttaaagtttaatgagattttgtttcttattacataaaaatcaactttattaatcttaaggaaatctccgtaagcattgatgttttggattttacacacattaaaaattaaacattattttatgactgtttattttttatattaaatatttttaataactataaactaatactcattgattgtaatctaataaatttaatcattgcatcctgaactttgtgatttataatatcagtcaataaagaagaaaagaaaaaaaaaactacaaaattaaagtggaataaacttaaaatgattagaaaaagatggagtacattttttctattattttttcacaaagctttaaacctaacattaaaaaatttgcttgttttgtttccttcgaaattataagattattgcttaattaggttattgaattcgagtccaaagccacgacccccaggttttaaaatccaaatatctccgttgcttgtttatttttgttctatatcgagtttattatctaaaaacgacaaaccttttactgatttccaccatttcttgtacttttcaggttttctgagacatgaaagacaaagaattggcttatcaacagaaactatcaacaaataaagagtttctgaagcacattattagatccttttgtacatttttctatttatagattctctcttctttttttgtatgcaaaagtgacatatactataacaagtcaaagaaagatgaattcaataagcatgagtgatttttttaaatcttcaaaaagaaatatctgaaaggtacaaaaaaaagttttctgatttttgtcacaataatggagaaattcatactattttagggtttcttacccataaaattcactgcatgcagtgattggattcaccactttcaaattcttgttttgtttgtaaaattgatgactcgatctcatggatgcatgcataagagagtaaagagattgtcattaagttctcctgactcaaccatcactatctctctctctctctgacacgaacgcacatgcatttacagttttcatttatcacaacaactacaacttctcttctctctctcggctgattaagcaacttcactttccatcttctgacagacacattaaaaaatggcgttgcagtttttttcatgcaaaccaaaatatacattcctctcctctcttcttctacttttgcttctttcttcttcagtagctgagctctctttcaacttctacgccggttcttgtcctggagctgagttaatcgtcagaaacaccgttagatctgcttcttcctctgatccatcagtccttgggaagctcctacgtctcatcttccatgactgcttcgtccaggtacattacattctcacaggactgcctcttccttgcataacaaggcatttccaatttaatgagatttttgttcttgtcattgctgtcttagggttgtgatggctcagtgttgattcgaggaaacggtacagagcgaagcgaccctgggaatgcgtctctaggaggattcgctgtgatagaaagcgtcaaaaatatcctcgaaatcttttgtcccggcacagtctcttgtgctgatatacttgttcttgccgcaagagatgcagtagaagctgtaagaacttcatcaaaacacacatacataagaaatgtttatatatctgaataacttaaaccagacttttgcataaaatgctctgtttgtatctttatttttggtttttaaaactctgtttcttgttgttgtgaatactatttttgggacagctcggaggaccggtagttccgataccgacagggaggagagacgggagagtctcaatggcagcaaatgtcagaccaaacatcatagataccgatttcacagttgataagatgatcaatatcttttcctctaaaggcttatctgttcatgatctagttgtcctctcaggtacgttatctttcttgatattcaagaaagagagatctttctttaaaacaaaccttcaattttcgatctattacgggtctcaggagcgcacactattggagctgcgcattgtaacacgttcaacagcaggtttaagcttgatccaaaaggcaacttagaactaatagacgcgtctctcgataactcctatgcgcaaacacttgtaaacaagtgttcatcgtcactagatccaacgaccacggtggttgataacgatccagagacatcgtcgacgttcgataatcagtactacaagaatctgttggctcacaagggtttgtttcaaacggattcagctctcatggaagatgatcggacgaggaagattgttgagattcttgcgaatgatcaggagagttttttcgatagatggactgagtcttttttgaagatgagtttgatgggagtgagagttggtgaagaaggtgagattagacgttcttgttctgctgttaattaaacgaagattagaccaagtttctcctaatcaacaatttcttgatttatttattttcaactccaatgtagacaatacgaatatttaaaaaagattaaatattagtaattttatacagaaggagttgcaaaatgtaaattttactgttaaggaacttcatgcgttttttttgaaccatttaggatattgccacatggatcgatcttttatgcgtgttttaagatggattcgaaccttaatgaaaagtatttttttaaaaacaaacagatagcaatatcatctccacaaagtatgcattttgagttgtaataagtaataacgaatttcaaaaataaactcccgtcaaacgttaatgtatccctctcctaacgaagcaaatagtaatatcatctccacaaattttccatgaatattggtcaataaactttctaccattgattcccctagttcacatctcaagtgaacattggtacattttaataatatttcttaacttatatatcatgttaaactaaacttaaaaaaaaaatagcattttcccgagttgaaaggagatcatatgacacgtttgtttatttgttcatctaaccataatataagttcactttaatttttaaatagaaatatgttaaggaaaatatgcacaaaataaaataaatgaatataaaacgatccgaccaacaaaataaattaaaactttgtcatccgtgcaaaataatctgaaaatttttgaattcaaaatgtaaggaagacaactccagtcttggtccaatagacaaccaaaacaattgtaatagacctaactatgcaaacaaagcccaagacgagtgtaaaagcttcttcagactttaacggtaacagagcatcgtcgtcatgtactcagcttcgtactgtcaaaatgtcgactccagctcacgctacactccaattgaagaatagcttcacagtccttgaatctccagccatgtgcagatgaagacacttgtcattcatcaaaacatttactaaaactctagttcaaccattgtatcccttagcttttcatataaatagataaagctatgtaatgagaaggttaagaatgagaatataactttgagtatttcttctctgtttacaagagtagtacttgtcatctcttgaaaaccccttctcaattcagttaattagaagaaaaaaaaaattcaatttataaaatgtaggaaattattttcatatattttggtttagtttcacctaatgtcacaaaaaaaaaaaaaaaaaattccatatggttgagaattttgaagccatttatctcggaagttcagattttatgtagaaattgctaccaaataaaatgataaatttatactgaattttattagtaatagcatattttgtacaatatgttttgaatgtcaaaatcggttggttgacatccgaaaatggtgatatatttttctcctcctattgacacaaagaataatattatctcaataatatttcaatgaattgtagaatttcaatgtcattgatcccgacagttcacaattcatttggacattgctaccattacttaaactgttaattacaatatatcatgataaatttaaattttaaaataatggcatacttagttttatctcttatgtatatacttattttaaaaatattaagttgatccccgcatatatttttagatcttgtcgtcacaatattacataaagtttttaacctctcaaaggctctagctttcagctctttgtcattgacaccaactcacgaaaaacatatcacgcaaagtatggagaagaataagaggaaataacagagtagaagaaagggagaagaagagagaagcacacaaatatttgttcacctggttcacggtattaacgaaccgctacgtccggttatgatctttctttcgatccacatctttccactatgaagaagaaggtgactacaagagttataagtcaaagcttaagtggaacagagacttaactgctgggccacaataacattgttgtgaattgatagtgataataaaactagagcttcttgtgctaaagtaaaccttaaaggttgcatcttgaaacgccaaacgtggctgcttgaaacacaagatgagaagactgtcctaacttgtgccagcccttgcaacatcgtggacaccctcctttatgatccaaaagcatttaactcaacccaagttcaacttatattaacttgagttagctttaaacttgcttatcaagttcatatcttcacagttttgatttgcggtttctgacttcattcaaaattttattatgatgatgttatgttcctttgtttgctaagagtctgagaatcgattcattatgaaaactagagtatgcatatgccaacacttttcgaatcatttgatatgacaatcattgaagacgtatggtcagttttacgcaaaccaattgatatgaagtgatatttcgacactttatgagtaatgacgacgaaaaatgattagattatctaatacttgaaagggttctccttcaaggttataccatttactaaaagagaattagtggtttgttattttagaatatgtagatttcttcttcttttgtgttgctttcgtttgattaagttttttctcatgtttgaattttcattaataactaaatatcttaatgtttggtttctttgcacaatttttctcttctaaggaaacttgagagcaattacgagcacattctactttgattccttggaataaggttgtttggttcaagaatgcagtgccaaggtattctttcatcacttagcttgcattgaaaggtagattgcttaagaaagacaggctcataagttggggactgaatatctctgcagcttgtgtgctttgctctaacggtatcgaaacccacaaccacctcttctttaaatgctctttctcttcaaccgcgtgacaagtttttgcttctcgaatctggcctcgttcaccatcaacgttggcctccatcgcctcttgaattttgcagtctcggacaccaccacagctgattgtatgagtttgtgttctatatgaatgttaatcttaatagctcaactcatttatttttgcatatcgatttcttacagagattgtaaatcaaaatttattagttcaacattaagtaaactatataatttaggatacaattgtgagaattaattcaaaaaacaacaatcttctaacaataacttagcccctgattaaatcaggaaacattttagttttaattatccttaatctgctattaaccgatatactactaccatgtttctttcaccggaaaatatcagaaactcggaacaacaccgaatccgccataaactccgacgtctccaccatcattctctctcgaatctgttctcttagcaaaacgtcctttgattctcggcctcatctcagcgtaagctttacgcgacgcatacctaatcgtcttctcaaatttccgattcttcctcttctctctatacctcaaaacccttgcttccctctccgccggtgataactgcacagctggcgtctccgtgttcgtcatctccgccgtcactcctccactttcaggcaccaacggtacatctatcgttctcgtcgaaacctaacaacatttcacaaactcaaatcagatccaaactttcagatctagatctgaaaattttccagatccatggaagcttaagaagatagagagagattcgtacagtttggttgatgaaattgaatccttgttgagaaattttggaagcagagagatcgaaattgaagtaatcttcgttaagaaacaacttattctgcacaggaacaactccgtcgttaccggagctattctcctccgacgttacctcaatcttcggataatcaagatcggagaacaaattagtgatttcgattccttctttagctaaaagccacgaagcagtgacgtcaccgccatcttcatctacgaaattgacggaggaggaagcggattttgctggacctacagcgtcgtagaaaggagtgattggtacgcgctcgtggcggcgagagagtggattagctgagtggatatcacggtcgcacgtgacgcataacgcagcggcgtcagctttgcacgtgacgtgtgctggtgcttgttcgcatacttcacatagccaaactcgttcgtgacgtgatgcgagtttgttagctgtgtggatcttaccgtcgcagtcgccgcagagaaacgcggcgtctgcgcggcagaatagagttgctgccgtcgatttgcacgaatcgcaaagtcttgacgacgacgccattgatgctctctatatctctctctactgttttttttgtagagagagggataataatggagtcggctttttttttgtattgactcttggtgttatggaagtggcgattgtaccggacgcgcagggagtgaagtgggtcatggagatctgggaatagcgaatagagagatgacacgttagtgaatcttagccgaatagttggagtttacgagacatttaggagaagtggggctaatcatgtgaaggtgtattaacttgggttcatgttctcacggactttcacaaaaggaatggaaagttccttctttttgtcggcaaggaaattcgaatttacccatggttacttaatagttaataattaccgtagatgctatgtaggcctgggactaaaatccgttatccgcgggtattcgaatccggatccgtgatccgatccggaaaaccgaataattaggtgcgacggatccggatacgagtccggcggatctggatacgagtccggcggatctggatacgagtccggcggatccggatacggatccagattatgaaaaaaatcagagccgaatatccgcatccgttcaatatgtctacatatttgtattatgggcttaagttatatttgtatcctgggcttaatcaaatacacattatcaatgttaagcccaatagtccaatattagcccactacgacaaaatgatggaatttgagtttgtttgggacttaactattagggtttcataacatattttttctgccgccgtgaatgtttccttcatcaccatttccttcactatctccatctcatctccatgtaatcttcatcaccgtctccccaccatattcatctcggttccaccgtcgtaaatttatggacggaagtttacttacgggaatgatgatacatgggattcaaagtgtcgatggcggagatgaatgaggaggagcagattggacaccgttaaagacgagatcttggtggtatgtgccttgcaaagtctgatgtcgggcacacgtcgatctcttttggtggtgaattcaatctggttggtgaaataggaaattgaatttgttcccaaaaataaacggatctcgaatatccgcggatatccggttttttcatggatattcgaaatccggatatccgaggtttacggatccggatgcggatcctaaaactacatatccgccggatacggatacggatccagatactccaaaaaacccggatatccggatccgtagcaggcctaatgctatgtacagccttttgtttatgactagaaatcgtaatttttattgagttacgataataaaacaaatttgtttaagttaatttgctcaacacccgccatataaaagattctatggtaagatcaagaaagagagccaccgtcaagttacattctctaaacgccgagccggactctttaagaaagagcttcacaaatcgcttgtgttttgttttggtagcatactagcattattagcaggaaagttaatcaaatagcttaggctagtatcttgctagttctatatattccttgcaaattatttttgcctctttgaaaacattaaaaaaaaatcttactatctactaaatggcataatagtgtcaacaattttatcattaattaaggagcagacaaattacataaattaggacttctaaaaccccaaacgtttgagcttctgaatccaagtcggcaaaaacaccacttggaaccaattcagtgtttcgtctggaatcagttcaatatttcatgttaaaaagtgatgatattaccccttatgggtctcaatcaaaaatctgtgttgggttttttctttcagaatgaaacaaaacaacaaaaagagaatattaagtgaacatgtcattgatattaactctttaagatgaagaactaagataaaaaaaagatactaaacaaaccaataagtaaaaatgatcaaagttacactcttgagaaatgtgacagattggtgtatgacgatgattttagccacttcccgacttcaatgtattactcaacctgaagatcaagatggaaatgagagaagaatatttgagaagaaatgcataaagaaatgggttcagtgtttcaataatgggaccaagaaaatggttcggtttcagaatgtgcttaccagtccaatccctcgaaaagtccctcgcctttcacagcacaagttttgaagattgcccattgacgactctttatcttatgcaactccaaggcttctgtaacagccgcatcatcgagtgcaccgggaagatcctaaattaagtcgatttaatgaaactcagaccaaatagttatagatttttcatcagcaaaaaagtgtcttgtgcatgcaaaacaaactaaagctttttagcaacagaaaccaatacagatttccagatgaatcagcccaaactaatcggaagagcaaacatttagagactactaacctgcttgtttgcaaatatcagaaccaccgcacctttcaattcatcttcctataaaacatagttgaaaagatagtgcgagttaaatgctgacagtggcagaggtaaactcaagtaagcattgttgctgagagtttaagattagctagcaagatctacagagagaaatgatcacttgttctttccgtccagtactaaccgagatacttcaatttcagtatcacctattagaaggctaacaatacttgatatacaacttacaagcatctataacaagtcctaaacaagaaactgaaccaatattgtatttccattcaactaccgatatacatcatcatcgttttacctcaattacttttggatgcaagaagtccatcacaaaataatacaacagtataagaagaggaagcctcagcagtactttacctctaaaattgcatgaaactcctctttcgccaccccgattctatctgtatcactcgagtcaacaacatagatcactgcttgtgtattcgggaaatagcatcgccagtatggcctgtcaaaaataccattagaaaattgggcaaaacaaaaacagtataatcttgatggagcatttctgttcttcattccttcacagtagatgcaatatgttcatcatatctagaaatgagaaacgaggtcattaagctacctgatgcttgtttgtccacctgtcataggaaagttcttgttaatgtactgtgtcgctgaaccaattttgtaaaatgcaaaagcattcgcatataactaacaagacagatgtacatacaacacgtgcaaaacaataataataataaaaactataggaagaagatgtgataatacagaactctttatcacccaaatttgaatacaaagaacttcatctatctcatcaagaccagttggaaaaggtaataacttggaacaagaaagtcgaatataacgacacatacgacaacaacttatctaaggactccaaatcaaggaaaattctgatcatgaattc

SEQ ID NO: 279 - DNA, 88098 bp, Arabidopsis thaliana
gaattcaaaagacacaatgctgcaattagcataataaagaaaatcacaaaactgtataaaattagtattggagatattaatcatacgttgcagcttcatcagatttctgcgcttcagcccataaacttccttgcactgccctagtaagctttaaccaatgatacggtttcaagttggcctttctcgtttgaccctgacctttaagattctgtaaaatcccacgcccctttaaacccaatggtggtccagggactggaggaatatttccattatgagaacgagacaatggtgcaggggcaggtggaggaggaacaggaggagatttcaacaccaaagaacttgtgggggctcccattcgagaattagaatgcaaaggtggtggtggtggaggtggaggattagttgtagctaacaatttctttggaggtaaaggtggtggcagaggagaagatgaaagtgcagaacggtgagattgtagaggaggcggaggtggaggtggaggaggcccttgtgttgctatggaattgctggtggaacttggtgaaggagtggagcgcagagaggatatgggaggtgggggtgggggtggaggcggacgagacaaaatcctcagtggcttcagtggtggcaatggtgatgacgtcactgctgcttctgctgaaggagggccatttgaatgaacaggtgtgggagactgtggacattgtggagaagcttttttgggttgcgatgatgtcagcggatgaatgttggtagaaacgaaattgacggtgaagctggtgatgatgaagtagactcttcatctttacatgaaccatgatcatgtaatattgaagtgatcccaaggctagagggtgagctgtgaaatctggatattgaagcaggtgatccttgtgtggggctacggtttggaagtggtgatgttactggactttggaccattcgaggtgaaaatatctttgagtgaacatttctttggactgaaactcgaagtccacgcgattcgtcaaccttcttaaggattgaattcggatctgcataagatttatgagaggacattgtatctttctctttttcaggagaggatgtatcaggacttgaaacaatattttccgatatcatcaacttggttttctccttaactttctcaagtgccgattccaataggctacgtgagtcagggcttcgaggagaacctgaatccaagctttcttgaaggatatttgctgctgttatttggttgaaaacagtcacagcaacatcagaatttggatccaaccattcagcttcactaaatatctcttgaaccttagcaaatgcttccataggtaaaacatctttttcctccatatgtggcagatcaacagaggcaagctttttaccagcacccatctccgaaaatataacctgaacaaacacagaatgttactcctctcttgacttggaaagacaattagctatgtataacataaaatgcttttaacagatatgccagactcaaaactgaactcactaatattaatcattaaatgcacaaaattcttgactcagagagatgtattacacgaagtacttctatacaaatgactagtataattctgagctcatcgggactgaccatttaagcttagacaacaggcaactcttttaactaggaaaccaaaattggtctacttattaaagagaaagaagataattagtcacctctgcactgaaatccttgggaaaccgatccgttgtattccacagtacatcaatctcaccacggttaagtgttagaatgtttgatctaagaaatgcagtattgaacacgacccgaaacatcatctcttccctctcaagatcactacctagggtaatgcactctagcacgacatcaccgagaatatggcaattgatgtcaatctttaccagttcacaatctgcctgcaacagtagatgaaaagttaggactatcataactctctgatactgggaagagtctgtataaatgaacacatcaatgataaagatcttgatatcacctgcttatattgcctaacagctttgcttcttttaggcatcgagaaaagaacttttgaagtccgatcagaagccataaaaggatcttgaccatatattctgaatatgggtcggcaaccaccctcaccatcaaaatcaggaatcagtctaagattaacacagtctaatgtaagggcctggtctagcggtggccattgtgagccaacattcctcctcgagatatactgaagaaacctcaactgtgaaggcagcggatttagtggagacattagctgtaacaactcacgaggagcctgcttatatatcatttctagtgttctgtgttctccactaaactgtttgcggtataacaagagcgaagcaagcataaaagctaaagtcggccatccgccaagctcacagtgcgacaataagatattctgttgacttaacaataaccaactttcagctgattttaggaagtgatgcaccgtttccattgtaagcaaagggcaaccttcataatggcgaggatagtccatgatggtcatgtcatactcagttagtacactctccatccggcttctgctatctccatcccggaaattaaacaccatgaatgatgcaccgggaaactgttcccttaactgactcattatgcggctcacataaactctgtaatcttcatcttccaacatatccgtggttaagcagcaatcaaagactgtaatacaaaaacatcaaagttcagcaaccttatagagcaatcttatatttcgtaagcagcttatagagcaatcttttgtatctttctcactaaaatagtctatttctcagagctaagcatggataagacaaggacgaatttgagaagtcatgcaacacagtgaacatacaaaacctgaaaaatctatccatgagctaaatctcaccgatcaagaatcttaagctatcaaatgttagattcagttcaattaacaagcctaacaagaagtacactataaacttaggctaaaattatgatttttaagacctaaaaattcaaactttctaaaatttaatactctaagagcaagggataagacaagcaaaaggatttgagaaatcatgcaacccagtgaccatacaaaagaaactgtttcctgacaattctttgagaatgagacatcttaagctataatagatagactttccaccaatgagcctgagcctgtgctcatggatagttaacagaatccatgaactaaatctcacccatcaagaatcttagtctatcaaatgttagattcagttcaatcaacaagcctaaaaagaactagaaactaaaacaggacactacacttatcaaaatctgatcttaagacctaaaaactcaaactttctaaaaatcaatactccaaagcccaaagaagagcaaggataagaaagcaaaccctaaacccatcacttaaaagaagaaagagcataccgtaaactctctctgagatctcaagcaacccttcaggaggttttctgtgaaagaactttctaaacaacgccattgagaggtttctttaaatgcttaactcaaaaaagcagagaggtcacacaatccctagaaataatcacttatgaccaaatgcgacccacattgcaggaaaaaccccaaataaggagaaaacaaaaacgagaaaaatgtcaggaagaaagaaggaagcgtgagataatcttattgctgggtctttaaggaacaatgcgatgtgggttttgtttcttttgtagtttggtggtttgtcttgacatacacactttcaatttcttccgttttggaattggaaacttagctttcaatcaaaacagatgtttgatagctctgcacatgcgagaaagaagaaagggaatgatgcagagagagaagagagagagtttggttatcttgggaaaagaggaactagggtttttctttgattctaagaccaagaagaagatgatatagctattgagaaattcagacagagattgaggatgatgtcggatttcagatagaagggaaaaaaaagaaaggaggacccaaagatctgttactttgtttaggactatgatacatgtcttccaatattcttttttgagttatttaagatttgctttcttttctttcctaaactcggaatttgcaatttatttccttttgccatgacttcatttaaaaaaattaaataatctttgaatgagtacacacttagatatcatagtttgtttttaagtcattaatggaaaaatacaatttttgtaattttatatttgttagaaataattttttagctaccgattcaaccgcgaaaggtagattatggttcgttacatatatattgaaccaaatcgacggaatacttggtccgtcgaaaaagttaattggttttaagaatattggggtcacatacaaaataaaactgggatttttggtatatgtataaattcatttttctaatttaatatttacattaaatttagacattttaaatgaaaagtaagctattttttatattttttgaagttcacaaaaaacattttaacgattttgaaaagtagatttcactttaattattttttcgttacactttttaaccaaattacataaaaaaaatgtttcattcatcggccctgatcacttctcaagttttccaatatatgacattattggaggtaacaagatataatacactaatatgactgacaaactgcacaagacattttcttcatgtccctatatatggttagggagaccaaattcacctaaacaatactatagtttacggggtgatgctagacatgtcagtacaatagtctcaatcagtgggaaacgttgcacaaacggatcatgtagctgagtaaatgagttgatgcctcgttagttggtaaactcatgagccattcttgctattagttaaaccaaatcccttgtataaacacgcctctcatagtcatagatgagcttatgtcttgttctagtaaatgttataaagaagataactcaattgataattggttttagcacttggtccttgctctgttgattcgaaatccttattgaaaaaagaagaacaacgtaaattccttgttaaaatttttgaaaatttctattttctttgggccaggagtgatctcaacaaatatatccgaaaatgtaaaggtgtgtatacgtatcaccccaatagctaataggcccaatacggcaatacccaaacgtcaccatcaccaaatagaatgactagattttactttgtttactacgtttattcacgaacaattattttgtcaaaattaaaagcgagacaacgagaaacactcatagttttgcctgacacacacaacaaatgtcagtatccataattacattgtttcaaattttctctaacggttacatcactcgcaacggctacagtaacaaacatttaacgtttctttaccttttcaaaattcttcttttttcacaacaaaacaaaaagtaaataatctaacggctagttttcgaattttcaccactataaaacctcacaagaacctcctcataactcagcaatttccaaaacaacattcctaacactacactccaagcaactagcttctctactactcaatactatgtttctatcggcatctatggcttcttcttcacttcacgttgctatcttctctttaatcttcttattctcactcgccgctgcaaatgaagtcaccgtcggtggaaaatccggcgactggaagatccctccttcctcttcttactcattcactgagtgggctcaaaaagctcgcttcaaagtcggcgactttattggtacccaccattaaaaaatactctgtttctgacatagactttgtttctgttctgacacaatctgtctttttcagttttccggtatgaatctggtaaagactctgttttggaagtaacaaaagaagcttacaacagctgcaacaccacgaaccctttggctaactacactgatggagaaaccaaggtgaaattggacaggtctggtcctttctacttcattagtggagctaatggtcactgtgagaaaggtcagaagctgagccttgttgtgatcagtcctcgtcacagtgtcatctctccagctccttctccggttgaattcgaagatggtccagctttggctccagctcccattagcggctcagttaggcttggtggttgttatgttgtgttaggtcttgttcttggtctatgtgcttggttctgatttggaaccatgtgatgagtttgctttttagaatgagctttttgtttcaaaaagctttctttcttatgattacatgttgtgttgttgttagctaagagatctttgtcctttggctccttgctactattttgttataaattcaatttattattatttctcagaactgccacaaattgactaaaaaataaaaatctacaaaaatctataaattagaaaagattatgaaatactacaaattttgccagtaacacaagaaatatgaaagatccaataaaatattaagccaaggttagtagaagaagcaattttgatgaaaacaaatcccatgatgttggtacaaaaagcttgtccttgtgaattttttaaactatagctgaaaacatcaatcacaagaaatatctatacaaaggtccttttaagattaaaccaaactctgtgacatctcagacttcttgaagctaaactgggaaaaagccagcttcttgaatctaagccacattcaaaaggatttacaatgttgaacaaaaagtcaatgataaaagagacactttcacaaatcttcttcctcttggctctttaaagatatctagcttgatgagctcggctcatcttcgcttggttctggtttggaatcttctggttcagtctcagatgggttaggcttcttgaactgaaccaagatgatggtcatattatcacaaccttcaccagtcgctgtatctggagccaaacatctatcaacaaccttttcacatactgttgaaagttttgtttcctgaaagtttttaccaatgtcactgaccaagacaggaacaaaaactgtaatagagagtaggagaacgaaagtggttaacttacagattttaactgttcatggataaaatcaactagttcctggcttgacatacaatccctgaggaagataatatgaattcaaattatcatcaagaaactaacttatacttagaaaatgacacaattttgtgacttttctcttaccatattccatcgcaagcaacaacaagaaagtcatcatcatcacataggtcaatctgatgagagaaaacaataacaagtcagctcaaatataagaaaaaactcaagcagaaaatactaaaagaagttagattcttacagtgtttatatctggatcagcagtaaccatttgcttttcagatggtaaaaacttattctgcttgaactccatatcacctataaagaggcagaaacgatgcttctatcaagattacatgtcaaataagaatctttaaggcatgaaagtgtaagagaaaaaaaaaaggcttaccaatggctcttgtcagattcaagcttccattgattctcccagcgtgaataaagccaccagctttcaatatcctttctttttcaacttcaagatcaggcttgtgatctttagaaagattgtaagcctgactctttcttgatatcacacaacgtgagtcaccggcatttgcaacaaagagcttcttatctttaataagagctacacacgctgtgcaccccgaggtaggtcccgtgaaatcagaatgaggaccctgtataagaagaaagacataggtaagaggtcccaactcaatcgtgtacagaatacggaagaagccaagtaaagcaggtatatgaaaagatttacatcttcaagaggccaactatcgggttggttattggtgtcaccgcttcttggtgaccatataaatccttcaatcatgccgctaaatttgttcatcttgtcgccaagtacagctaactctcgccatcctctttgtccttgcatcatgtcatccattctacaatattcacaatgaaacgcttttaagtggaacatttgttgtaaaagtaaattactatacaagaatgtcaaatagaaaataaacctaaagaatgctcttcgaagagatgtttcgacgtctccagttttatacgcttcattactgataacctgctggtgtagatacttggcacagaactttgcaacgactttacctacaccagtaaagaaccaaacatcgaaaaatgtaccaaaagtatattacacagatctaagcaactaaaatctttgcaattctagcagatttgtaacaccaactgaaaaagactctaaaacttaaattcaccctagaatatgattaaggagtagagacagtagtttcgtacctccatggccatcatacacaccgaagaacgatgtcttatcatcaagatcaagaattgcagcatgctacaattgaagcaagagatgtgatcagtcaggtagtttgatactaatcaacaaggaaaatataagattatgttttgactaaccgcgtcttccatggtagcgcgccaaccttgcatagacgataaaccaaatctgagcttatcattctcaccatcttctgataacttttcagttttcggagaacttaggtatgtacccatcgctttcagccaaaacaacaacatcattcttagctccacaattcacaattcattttctagctcatagacttgtacatgattcagagttgacataatcaacttagaactactcagcaatcaataatcaacaaagaaactaacttgaaaccatcaaaccaatcagaatcttacacaatctaatatcttcctcataaacgtgtgcatgattcacagtggacctaatcaagaaagaagctaacttgtacgaatcataatcttacacaatccttttctcttaaactgatagacttaatcaactcagaactacttagcacatcaatcaacaaaaagggttttgaatcgatttgacctagatgcgaatatttgactatttggatcggaaaaagattcagatattaaagttatgacagaagaagctagcaacttacatatctgggtagagaaatgaacaaaaaggaagagcctttagagatcttcaagaccaaattctggagtttaggagaagaaacttgatcggggacgagaaaaggaacagaaccaaccacttgaaatcacttgagatcagatgtatgtacaatcaaatcctaaggacaaaagataaaaaaagtgtgttctttttatttattgttttgtccgagaaaagaaaactattaaaggtctttacttttttcaaaactttttcttgttaataacttacttaactaaaacttgagatgtgtaatctttacagctgtttaaagctttctctgattcgtcatcacagctttaagaatgtgtgtaatcgtcattgtaaacagcaaaattacagaagaatttaactagttgtgtatttgctatatgtagaccattagtattttgtcatcttaactttcatataaactggttttgtcgttggctaaaagtatattaaaaattttaaacagaaaaagagtattatggtaggataaattgcaaaaacaaattaacatatgctagtttttacctggcatttaacaaaatttatgatttctgtttttatatcgaacatacatagtttcatgatacaatcaatttttgcacttaggtatgtgaagtaatagaaatggaagaaaaaaatacaagaaaaaggaacttcagaagattttttgtctccaagtgaaagccggtccttagttttgagaggcttgaagcacaaaaataattatgtggtctatcaaatatttacgacttaaatattgtattacaacattattaacatttaaatatcttaaatagctaaaaatataatatttttgactttcaatgaggcaaggaactctcgagagaggtcttcctagacccatgttggtgaagatagcttcgacgtcttctaaaagcacctccatcgattatattaacgagtgtttatactatttttttttaatataaatttgaaatatttgtgaaaggagaaaagagaagaaacatatgttaaagacactttttacttacatgtcactttttgattgggtttaatatttttacaatttattgattaaaattttaatctaacttaagacacttcactttgatcaccggtgcagatactttaagagcctcgcttcacgaagaaaaaccgaatcggaataacgagtgggagtgaattcggtgagcatgtaagtatcaccctcatcgcataaaacctccttagcttcaatttcgaaaagggaattgttatatactgattgaacaaaataaagatattctatagtaaacacatgttatatagaacaacatttgagattgatattgtaataatggagagaggtagcttctaatgagtatactactaaagtactaataagaaaactaaatttggctgtcacatcttatctatttgtttatgtggcccaacatttccaatatatattacaaaataataataatggataggcattgccaccggttagattataactcttcgtttgagtgcgacatatttgtaaccagagacaataattaggataaggattgaaccaaggaactaaacaaaaatttgaggatgaaacatagtccaaaacaaaatccatttaatttttgggacaagaacatagatatcataacacttaaatatgtgcctcaaattggtccaaaatgctctcgtgaatgaacgtggattttgcaccactcaacttaattacttactttgtcccatttaaaaaaaaaaaattataaaagcaaaaatattaaggaaaatttttcattataaaaatatcatctaatattttaatttaaaaccctaccataaatcatagaaaatactgcagcatataaataatcataaaattaaatagaattttacagtgatttcatataaaatactacagaagataaataatcataaaataaatataattttgcagtaatttcatagaataaaatgctccagaatttaagtaatcataagaaatctaataagcattttgtaaataaaaaaatccaactttgtctccaattgaattctgcaaaaaatccaactatactgcaaaacaaattccaattatgtctccaaaacgaatttgaaaacaaattgtgaagaaaaatatcattatattttttgtaaagtaaataaaattaaaaacacatttatggtccaaaaatttagttttttttgtttttttagttaatgtgtattttggcatgatataaagtgcgtcgtgtctcgactatatcatctctcggtttcactattgaacgtgtaacactggtcgaaagaagacgaacataaactcgtctccggtaaccaaaaatggtttccatgactacttcatcttcttcgtacggaacattctctacagtcgtcaacagttctagacctaattcctcagcaacctttctcgtcccttccttgaaattctccaccggaatatcgaatttcgcgaatctgagtaatgggttttctctaaaatctccaattaatcctgggtttctcttcaagtctcgtcctttcactgtccaagctagagctgctgcagaaaaaaccgttcacgatttcaccgttaaggtttggttcttattcttttacccaattcagaccaaaaactagggttctctaaattctatctgctctttagtaaattgggaatcttcaactttgcaatgaagttcatagtgatttcaattgagacatacataaaaatctgaaatttgagacataagtgtatggtgatttcaacttgatacatacttagattcatatttttattgaatttcgtagtgtatatttatactttttttttttgaaaaaaggtgtatatttatacttaggttagtgatttcaattagagacataattagattgttatttttatggaggcaggacattgatgggaaggatgttgctttgaacaaattcaaggggaaagttatgttgattgtcaatgttgcttcaagatggtaagcttctccttcttcatcctcttgatgtgtttgatgacagttcatgtagaggtttctaatcttaaagattgtgtgttttatgaacatacagtggtttgacatcatcaaattactcagagctttcacatctgtacgagaaatacaaaactcaaggtgagttctaattagttctctcatattgtgatctattccggtttgcaaccagtgggtattttggttacttactgaaaattcctcgtgttttggtgttcacttaattgttctgtagatctttatattattgtggtgtcaatatgatttggttctattgttgcttcttctacagcgatgttactagctcgtagttcactttaatttatggaaataaaattgttctgtaacgttgaactgcaagcaaattcagcatctttgtttgattgatgataatctcactcatccgttctctgtagctaaaagaattttctcgaaagtacggatctgttcattaatcatttaggaggcaataagccaatgaacgtgtatttctcatgcatttgtagttagtaatactagcttgttgtttggattacaggatttgagattctagcttttccctgcaatcagtttggtttccaagagcccgggtcaaactccgagatcaaacaattcgcttgcacccggtttaaagcagagttccctatatttgataaggtataaagaatccaaaacattcattcttcttattttcaggttgcagattctaaataagtttgaattcgacaggttgacgtgaatggaccaagcacagcgccgatctacgagttcttgaaatcaaacgcaggaggattcttgggtggtctcattaaatggaactttgagaagttcttgattgataaaaagggaaaggtcgttgagaggtaccctcccaccacatcccctttccaaatcgaggtatggctaatggactacttcctatttggttcatagcggttctattcccggtttgtaaccaaaccgttttgtttctgttttgcagaaagacatccagaagttgcttgccgcttaaaaacttttgctcatgagtgagcatatagagactgatggttaaagtaaccgtaaattgtgacataaagtttccggttattgcttgtataccttcttacattctaagttgtactaatcgcttaataatttgcgtataatggtaatgttatatacattatattataaaaatggtgttatatatacaataagacaatctcgctcgcgcacatccaatcaacaacgatggagatgatattacaaaaaaaagcattgaacccttcacctcttacatttcaaagtgtttattaaactagattagttacagttccttatgtaaaaattcaaatatttatagtttagtgggtgcaccaacgtgagtccgccctacttaatcttatatacattattttattgaatttgaaaagtaatccgcaatataacccttgaacgtgtatagattttgtaaaccgtataagtttgtatatagattaacaaaactacttcgctttgaacacttgaaaaaaaaaaaaaatgagaagtagactcgaactaatgacctatagaacgttcataacatatataaccaattttgcttcaatagtttttgacaattgtacaaaccctccaagtaatttttattgttaatcataaaaaaaatgttcttatacatttgcaatttcacaataagacagtctcgcctcgcacatccaattccaaaaagtgaattattacagctcatgaaacattatttattttgttatcatttgtgtcaacattatcattagtggtaacatcgtcttcatcatcatcaccttgccatgaccatacaatgtctttaagagctggtctgacgtcatcctcacagaagaggtaatactccaacgtatcccccgaggttttgcagaactccacgacagagacttcaggagcgacttcgaatacttccgccgtcaccgagagccttcctttacgaccttctgttcttctttgcagcttcatcttgcagtcttttacatgtttcactctcatatccatctcacgcgccgccgtctccagcctctctttaacagatttcgccgggaacttcgatgtgaacatccgctttggctttcgttttatctcgaataggttagagagatcgaaacctgaagacattgatgtgatgaattggaaggcgttgaaggatcttggtgaagctccgtcgtcttctttctcgtttaggtctttcttctttttctttgttggtggctccggtggagatgggatcgtttcgtctatcgaaaaggctactgatggtgtaaagttctttcggaaccatggaatcattttgatctctgacattgaaattctttgttcaggatccggcacaagcaatcttgagagtagttccttggattctaaggaaaaccacggtgggaactcgcattccgccttgaagatcttcctgtttatttcgaaaggttcaatcaaacaagaaacaacaatgagaatttgatcaattcacattcacattcaacaatactaatatttgaatttgtaagaagagcactatttgagaccgttattattggcgggagttttataaattatctagtaaaatacgggacgtgaaattttgataatatagaactataatgaaatatacgatcgaccaacatttatcgaatttgatatcagattaatgtacctaaaataccacccgaatattcacaaattgataatagtttcaatatcttggaaaatattgtataattttgagtaattattaaaatttgaattacgtgaacaaataattcaaatactatatatcttttctttttgtgtgtgtaaactttcaaatagtatatcttatatccaagttttgtatctattggtacaagttaaactgtctctttcaaataatattttatttaaccaaaaatgattattatttctttttaacatatataagtatgtgatgtaaaattgagatgcatctagaaacccaactcaaaatggactactttggcttttagttcaatatttttttgtatctcactattcgtcaaataaataacaaaaacaaatacggtttgggccaaaacctggtcaagaaatacttacgtgtacaatgtcatgacgttttcgtcgataaacggcaagaagccagcaaggagtgcatacaaaacaatcccgcacgaccaaatatcagccatagctccgtcgtatcctttattccgtaaaacctccggcgccacgtaagccggtgtcccgcaccgcgtatgtaaaagatcatcgctgctaccacgcctgccacctagcccttctggcatcatcaatgcggaaagtccgaaatccgttaccttaagatcaccttctccgtcaagcaacagattctcgggtttaatatcgcggtggaaaacaccgcggctgtggcaaaaatccaccgcggatatcaattgttggaaatactttctggctagatcctccgggagcttcccatctctatcgatcatttcgaaaagctctccgccgttgacgtactccatgacgaagaaaatcttcttctttgtagccattacttcgcggagctcgaccacgtttggatgacggaggagacgcatgacggcgatctctcgttcgatttgctccatcatgccacgacgtttgaaaacgtggtcttttttgatgactttgattgccacgtcatcgccggtggagatctctgttccgtgatacactttggcgaagttaccggttccgagaagtcttccgatgttgtatttgtcgaacaagacagtactactacggtttgattcttccattgtctttgtctgactagttacaagtatatgtgagactaattatgtggaattttgtgatttggttacatatctatatatataagcagaaattatttgtggaatttttttatttataatgttgtctactttgtttgatatgtgacgactaagtgaactgtgaagaaatgttctaatcttatctaaacaaagtgatgtgcctaagatctggcagctagcataattaaatacgaccaaagccaaaagaataaccaagacgaaattgattcgcgaattgaactaaatcggggtttgctatttatgttgagtgcctaaaaaagggttatagaacatgataaaactagatataattaacaaactaaagcatgaaaaataaatatctcgagttacgatgcaatgatcataagagaatgatttcaataaaagtgtaacaggtgatttaaatccatttctatgtaaataaatcctttttttaaccagttaaacaatggtctcgcacatttctgaccatgtattcatgtaaataagttcttaaagttttcagaatagattttaaaaatataaaagtaactctcttatccttatacaaaaattgtggacgccatgaaattgacgtggaatcgccgttaatgctacgcatgttttgaagtagatacgcattaattaaaaatagtaaacttgtcccgataaaatttcaatgaactgtctttttttggtaaggcaagatgtgaccttttctacttggcccttaaatatttttaaaacaatttcttgacttatttttcatagaggaatttttaatttctttcgaaaagctttgactcttttcctagttgggacgattgtatcggaaagtggtcatttctaatacgtccgtgaatctatcgaccaaatcttcctttctacatctttgctaatttcttggtttgatggattcttcatattttgctactcaaaacaacacactcaatttttccaattgttttcttacaatttgatgatttttctacatacatgaaaatctcattataaccgtgtatttgggtgggatactgttattttcctctatcataatcaaaggtacatcttgtaaagctaaatctaaattttaacaaaaaaaaaagaagctaaatctaaatttgttcgatttaaagatcaggattattaagataatatataactaatcattttaaggaacatgtataacaagtccaagaaactttgtgatgtgtcatgatttggacccacgattaatgacaacaattatgtttacacaaatgttaatactctaacgaaatactataacgagttttacccaaaaaaaaaaaaaaaaaaaaaaaaaaaaatactataacgagatatgtatttaaaattgaagagtaaaagggtaacatcacaaacatagtacactattttgtggctaattgggtgatcacagacatatatctacttatcgcgctgcatttccgattgtttgttattttcgggtgattaggttgtcgaaactagctgctaaaacaagccatgccgtgaattttgcatcacattgatcagtcaaatttcaagcagtagttgattggaatatgccctaaagagtgaaaagatttgcaaatccacctaaataagccatcgtttgtgctgcacatggtttaaatgttgcattacttaattagaaaacaatttgatcaaatgcataggagttctacttcgaacgaatctaaagatgttacctcatctaccttatgttttcctgatgatagaagacccccttacctaaaaatgttgttcaagggtaaacaataaatacatatatatacatgagtgtgtgtgtgtgtacaagcacgattcatattatatgtatgttgccaaaacctttgctatttgatgcacaatatgtgatgatgtaaactttatatataagtacagaatgtttgaatggagcttagacaatttcttgaaccagagaaaataaaataataattggtgttgttgataaaaactcaacatgccaagaaaaacagattgctgaagtatggatcttcaaattctatcatttacataaattaaaatgagtgatcttgcaaggaaaaatgtgaagaaaaatggaaaataagagttctttgtaagaaaggggaagttttattgaaatgaaaatattgaagacttggtaataaagaagaatgcaaaaaccgtgaagaatcctacacaattttgtctacttcttttttttttctttacttcaaaagtacaaaattttctctactttctgtagcttctctttttgttagaaagttgataaatctttgcaaaggacgactgtactggtctgaaagatccatgtgacagaacgaactgttagattaaaaataattacgcatttacgaactgtgtatttgtgaagatatattttgaaagacacttcgttaacaattttgatttcctacatatatctccgtgacaattccctaatcaattaacacatttcttcgatcagagtttgtcgtttgcgtttagaattgcatttccatgttacaatataatacacattactctcatttgaacattctttattaaaatgatgtacaaatgtgtttgattttgcgttttattttagaactatcaatagatttgatgagaaaggaaagtttttttttttttttgaatatatgaaatgaagcgaactaataaagctggaaccaacaactctgaaatcattaaagtcagaaacaaagttcaccaatattccatgtcttccaaatttcccaatctcttcagaaatatcagtattgacttcaattaaagctacaaatatgtcttaaagatgcaatcatcttaatcacagaaaatacaaatatacaccaagatacacatatttgaccacataatcatcgtgatttttagtccaacgactcacttacccaagttaaaactaaaaggtgtaacagtaggacaaaaattaattgtagtattgatattttgtcgacaaacaccaaaaaaattcaacagtattaacagtacaaaagtgggaagacatgacacatcaacttgtgctacctattcaacaaactcatacattattggctgctgtattagttttgcatacaaaatgtgtgtttgagagatgcagttgccagggaacatgttctcaagttaatctaaccataaaaacacctaaaagaatattctcgcaatattcatgtacacaaatgtaacatggaatcaaatatatacatataaaatgtagaaaaaatgtaagtacaactaattatatactaacatatacctattttgttaaataataagctaatcatgcacctcatggaataaagatgtacgagcaaaccatttaaataacaagaaaagcaacgactcattcttataatgcaaatatcatgaccttaacatcttattcacgcaaaatgagataatatatgatcgcatgaatcaaaagacataaattatatgtttacaaaggaaactagggattaaaacgcctcgagagagacagagtggaaaaagaaacgatataatatatacatgactcgagaaaaattaaggaccagcctattaacaactaggttacattgctaatctcacttaaccacgcgttaactaatagattaagcttttttcgatactacccatctcttaaaatataatgaatgattaaaggctaaaggtctcctcccgcatgcaagtagatggcacaaaaaatctagaaacaagaacaagccagagtttagatcgtatcttcttaccttaatatggagataaccaagagagacagagaaagattgtgtaagtgatagagagagattgagacatagagaacgaagacaggccaaagagatcagcaccggaatctgacagaaagagcagtgagcacgcaagagaagcaagtgcaatgatatgcaaattgcctttgtgtgctcactctcttctgtcagtttctttgcgtttctcttgtcccaactctttcattcacaattagtccaacttcagagatctacaagatgaaacaaagaaaacaagaaacgatgagaatcttttaagctttgtgttagatctgagttttaactggagaagacaaagaatcaaagagagggagggagagagggagagatatgagaagagaagagattccatttgagaccctttagaagatcaaatctagggtttttgtctaaatcgagaaaaaacataaccataaaaagcaaaaaaaagaaagaaagagggtaaagaaacaaagatctgatgagaagaagataagagaaaaccttatctctctctatttcaaagagtcttacctttctttatggctcttgtcgctttctttatctctcttacatgcaaagggaacagatgtctggcgacgcattgaattgaacagaacatttgaatttatagagagacctaaaaatggcaatgaacttgagatttgagagtgaacaatgaatggtcttttgatgatggaaggtatatataaagattaggaacccgtttgcctttttttctttcttttgttggctaacaatttgccactaatatgaatatttattaatttgcatttaatttctcatctcctttaattagattattattatttttttcgttaaatgtcttctctttcctttgttggcggaagaccaacatcaacaagccctaaagacttgcaaaattatggaagatatattaaacacaaaaaaaaaaaagactaagctcttttttttttttaattttttttttgtactgaatgacaattttgtgttacaacttgcaacatattaacataacttcgtttttcgatcagcgtaattttaagtgaagcgcgttttggggtttttcttgttgtcaagaaaaaaaacaggattatgtggtggtaataagaaaagaaaaaaggccatgtttatttgtggaccaatttgaaatattttataatttgtttcactattatgaaacattgatttttcttaagatgtttttgtatatgtaggcacctaatctatcatatatagaagttagggttttgagttaagtgtttatttatttttgtttgaagtctttttgataaattagaggccacataaaacaaataacatgttaagaaaaatatttccatcttgtaaacatttaaacaaaataaaaaatttactttttttttcatttctacatacttaattaacatttgtttaattaattttctattaattgtttttcaccaaatagataatgattttttgagagtgaataatggtgtcctttgactcaactacacgattgttgattatttagaataaagttgaaatctctataaccccgattttgatgagcacaaaattgtagtagctctcatactatgtaaaaaatgttgattacttaacactataggccaatactataataaccgagaaatctctaaaaaataatatactttctaaatatgatgaagaatatacaaaattagaccgtttatggttggatatgatttgagttagattacactcatgagttaaggctcaaatatgattaactttttattttattttctataaatcttatcggttgattcggttagttttggtagaaacacactgaagtgcttcagagtagactttttcccaaaggaccaccacattgtctgtcccgaatttgtaatgctttccgattaatactaagggtagtcaagccgtctgcatttctaactatcaagtaaaccaattgggttaagccccaactaaatgacttcccaaacaaatataatttttgtttccaaaaaacatcgaactcgagtccggaagtttcacccttccccaaaacttcccttaccactaaaccacagataattgggcaaatatgattaactaaaatttcttttctctataaatactgttcttaacctaacatctatatatatatcggtaataaaatatgtttctttgtacgtagatgtatccccaacagaaaaaggtttttgtgaaccacgtttaatttatgtcatgttttttatatctatgtcatcttgctcacatcctttaaaaacatttatattgaacactcttgtaaaagaaaaaaatctttatgttcacttataaaacttaccgaggaaaaaacctctttataggctctacaagtacaattatcttataaaacttatcatttactttctaccatagtttctgtaaatgtattttacaataacatcatgatcttataaacttatcttataaatgtattttacaataacatcatgatacttattctatagaaattctttaaaattctatagaaaattaaagaagtaataaccttctaaatatatttaaagaaactatagaacttgagtttaatttgggtttggtccaattaataataatgtcatcatggatgatcaataaaatcttattttacttcaatatttgcttgcatcttctccaataatgtagaagattatattcactctctagaatgactaaagaaatagaacatcgaatattatctctagatacattgacattttaatcacatgttttggaatcttgatcccctagctgaaagagttatgtcgagtgtcgactcaatctaagattctaaatctaaattatttaaaataggaattaagttatcaagataaagcgatgggtaacgaatagattcaatggaatatgtctcgaatacaccaaaagaataacaaagaaacaaagataaagtagtgaagctttatcgagaaaaaaagtataagagaaaatgttggcatgcattggacggggcatatttaaagtgacgtggtttcactataaaccagagagtcgcattaatcagtctgaccgttgatttgagacattaattccctgccgttggatctgtcacttttacaagacacattctcaaacttttcaaagtggtgtttgattgattgttttggttttctctatataatatttttatttatatacttctctttttgtttaacatttttgattaggcaaaatccaatctataacttaatttttaatgtgtacagtagtaacacattatttgaagtcgaactccggaaagaaaaacaggacggtcttgacattagtaaaagtgtaaaacaaaggctataaacgataagctaaaggcatctcctagaagctggattcagtcttgtactctaagtctaaaactgagtgagttgttggattttgcgagcttggagaaatttgcagcgtccttttccactcgactcgatttcttcgcttcttttctcgcatgttttgaacccaaaactgcttagtttcgcttgtcgtttgctgctacttccattaccactctcttcattttcatctgcttccctactcaagtgcacaaaacattacattcagattcttacaacagattgagataaatgaagggttcaaatagatctcgtaaggctttgattatagctaatagagcatagaagcaaccaaaaaaaaacaaaaaaaaactaaccatgcaacttcaacctcgcccttcaaatgtgtagtgcaagttccccaactgaagcggaccagtgatgggaatccaaacacagaatgtttgtgttgcactaaccacgcctttgtctcaggatctaaatagcattacaaacatattagtgcataacagtcgctaaaacataaacggtttagaggaaaatgtagtacctccaggatatccagaaccaaagtttctatttatatcttctccggtttcctctaccaaccattctttcaacgctctgtctcttgtcaccttagccacaatacttgccccactaacaatcggaaatagactgtcagctttctttgaaacgacgaacttgatcgaaggaaacctctcagacaattttattctgtacttgtcgggatctcccacggtatccagataagcctgcatatgcaattttgagttataaaccttctctctcaaaagatgatgcactcgtttcaatcgaaagctaatcacctctgtcagaagaactcccatgtctagtacccttttgataagccccattgcagagttatgtgaaatctcatttaaattagtcttgtttctgtcaaaaaacaaaccaaagctatctgatataagacccatttaagcctttccatcagttagcttcaaaaacattatacaaatactaactttgcgagcatcttggctgagagttccctaggatcaatgacatcaacagcccatccaagtgacttgtcaagctttaagctttcatataactcttctcttttctcctcttttagagtcttcgaatctacaagcagagcagcaaaaggcttcaggggaacaaaaaaagacaaaagacagtgaatgcaatcaaaagttccatgctttacttatgctctcctaaattggaacgtcagagtagcatgcttacactcacaatatacaaagcattgtgtagcaaaaaacttcaggggtacaaaaaatggcaagagacgaatgtgatcaaaaggtccatgctttacttgtgccctctcaaattgaaatgtcacaatgccatgcttatactcacaatatacaagcactatgcggcaaaagacttaacgggaacaaaaagagtcaagagaatataaatatgatcaaaagtctcatgctttacttacgccctctcaaatttgaaaacgtcgcagaacaatatgattacagtaagtcactaacaagtgaaggttaaactgtgtacacacataagtgttccactggtagaagaagaatctattcaatacattctcaaaccccaaaacaaacatatcaatgcttcaacataaaggaatgaaaagtgagaatttttacctgcaaaatggagagaagcaagagacgactgataggaaatgggacaatacatacatccataaaccataggacctgtaatatcaacagaattgaatcagattctgcttctcactcaccaaaattgatcagatacaagtataagaagaagaagaacctagaacaggaccccttccggcttcatcgatacccattagacaaggttgagatgcccattctggtgtcaaacattcagattccattccttcaacaaaacattcatatacattagggttttagcctcaattctcacctaatttggtcacattgagttctgggtaggtttcaaaacttaaagcattggacttttctattgaatatgaaaagctactccagataaactcgaactttacatgaaacaactgaggaaatagtgaataatttgagcaggtttgggttacaagagttaattttctggttattgtgcgacatgataggagaatgaaactcaccagaaatcaagagaggtaagcaaatcggagaaaatattaccggcgaacaatatcgatgggagcttcgcggtactcttctctaatttacactgcttgccgttttgtcgtagcaatgttggtaaaatgtgtcatagtaggtgttgcccaaaagccaaaataatatttaaataaaaacaatgtcaatgagttttacatctctataaatagataaatgatattaagtgacatgtttcttgtgttgtaatattcatattttcagttcctattctgctattcattcgaaagttttaatcatcttcaaagtaattctatctagagctgcttatttgttattggtttgtggatataaatttgatagtagtctaaattgtgaattatatatatgaaagttggtcaactctctccataaaatgacatgtgtcattcgattttttttaaactaaaaattaataaaattaaataagcaaattaaatgtatcatcaatcttactcttaattgatttctttaaaataaaaataaaaaacaaaaaaatatgttaataaattaagcactactttcattatattctttttattactattttttataacaataatcactactctataatgactaaatttttttaatacactataataaacttttaaaacataagacctaccaaataatttaatacgcgatcatttctcttattcactgataagattgagtgtgtataattgaaatagaatacataagactgaaattttgtttaaaacaataattattaaattaaatatgaagaaaaatatattgattaccatacaaaattcaaatactatctataaaaatatatttttatagatagtatttgaattatataaagtatggttttcaaagttactaattcataagatcgtgtcatgtgtcaagtcaaacgatcagatgtttacatgtgtcattaaaaatttaacttttttattctcttaaaaaaatagaaaatctaaaaaagtaaacaaatttacatatactaatttatatgtctctatatataattatatatatatttaacttttattcaacaaaaggaaaattaacaaatttgtttttacatgtattattgatcatttaaatgtagcacatattatttttttttttaaataatttagtatggataataatactaattaaaaagaccattgaagtttaaaatagtaatataatttatttaacattagtttagttggataaaattatatttgtcaatgtaatataatgttttcattcgttaaatcaaaacacaaaatattaattataagaataaatttttgaatacctatgttttaacctaagaattttaacgcatcgtacgatggagcgtcttgcatcctttgatgtgttactatacctatgttttattctaaaatttttaactcatgtaatcataagtgaaaatagaatattttgagaaaaactgcttataggatttaacttttcaattacttttaatgagaatatttttatttattaattttaactcatttaaaattaatttccatgatgtaaaattaacttacgagattatggcatataaaaaataaatattttcaacaatgtttggtttctaaatatttttgtggatttctgttttttagttaattatgttttgttaattgttaattatttttaatacccaacaaagatcatttctcttatatggatatatgcaatgacagaagatttaaaagtatttacttaaatgatactttcatttttgttttatttttagtttttcatatgaatactcttgaaatcttgttgagtttatatcaattctatatatttaatcatgagcctataacaatgttgttggagtattatatcagaagaatacataaaaccggaaatagtttatttataatcaagttagacaattttcaattcattcaagacacgatcatttttctaatattatgaattcaaaccaaagtgattcacacttttctttcacaatttatgccggatctagtacccataaaacataaagttaaatcaaactaaagtgtgaattcaaaagaacaacaaaaaaaaaccattaaaattagtttagctttgattgtgcctcaatgcaacctgatacaccactgataagacgacatgtcatcaaaatgacacgtgttaaaatatcattcgctatctaaacgtacacctgcgtgtcaacataaactgaggaagttaatgaactttttttacactgcacgaagaagaccctctcaaaagcacgaggaaggatcaaatcggaaacttaacagaatttagctaccaattactgtctccggcgagatctcaatttgatccttcacggtggcgtcgacgtccgggcaacaacaagctctctcgagaagaaagccattatcatcatcatcatcatcttcatcatctcctcctccgtcttcctcacctgttcgagctcctgcggcgaagaaaccgagtccggaatacccattttggcagcagaactggtttatcggtctgctattcgtgatggctttaggattcttctgtctcgctatcttcctttacctaagtctcgatcctgattccggttacacgtctgcctccgccgctgcttctggtaaagaaggtgtcgaggttcgttttcgatttcattgcttatgattttcggtgaatgtcgatttgtttcaatttcccatagatttgggggatttgtattgaaattcgaattaggtttgatcatcttctcgttgctgtgatattgacagattacttatggaagtgcgatcaagttgatgcacgagaaaactaaatttcgattacattctcacgatgtgccgtatggatccggcagtggtcagcaatcagtcactggttttccaggcgtcgttgattccaacagctattgggtaactttcttcatctagaaagattatctcacacttttaatcacatgtgttttagctctgatttagatgaggaagtttctagctatggtgtggtttcttggttttattaagtgttttagtgagggatggtggagtgattgaggaattgttttgttttgatagattgttaaacctgtgcctgggacaacagaaaagcaaggtgatgctgtcaagagtggagcaaccattaggttgcagcatatgaagaccagaaaatggcttcacagtcacttgcatgcatctcctatatcagggaacttagaggttagtattgtcttccattaataagtaaatgcaacatttgtattccctgagagatgtaaaagatcgatctggagttataaacaatttggctcgagagacagctagatctaggaaatgtatgtatagagctagtaataagaggatatttactagcgagtatatgtgacctgtgaagtactatactggttttgattcttagtggcattttctttctttctaacccattttcttggtgcaggttagctgctttggagatgatacaaattccgatactggggatcactggaagtaataatcctaaaatcaatttgttttctcatctgatgtttagtctatccacatcaaccaaaaactcacgcaccttaccatctgctcataggcttataattgaaggaagtgggaagacatggaaacaggaccaaagagtccgtcttcaacacatagacactagtggctacctccatagccatgacaagaagtaccaacgtatagctggtggtcagcaagaggtaactaaatatcatagtttctctcatctaagcctgatcttcaaagattatagcaatgtcttgaaactcatgctgtagatagatattcagcaagttttttaatgtatcggatgcgctttttctgttacacaggtgtgtggaattcgggagaagaaggcggataacatttggttggcagcagaaggagtctaccttccccttaatgagagcagcaagtaaggttaagagtgaaaaaacttctctggaggactttgaatcttatctcttactctctaaactcacaatcaagaaaatagagatatatatttcttaattttcgattggtaatacttttagtggcacgaatatatcttgttttggtagatattctgcatttatctcttttttaggtcacccttaagagacactatcttattatcctgatagtaaatccaacaatcctctaaaaatatcgtcttgtctttctaagaaccatcgttatgatacctgagacacaagtactatgtagttggtgaaatatgatctatatcccccagaagatcgatcaatcgcaatcgatttttttctacctttaactctttaagatatcgcagagttctcgacaataatctaactttcttgatacgccaagaacattttagtgctgatggaacttgtcaaagaacccatgtttgaaacgttagacaacactagagtataacatgaatttaacatctcatcctcacatccacccacacctagaaacagcagttaccatacattatactacgactttaattatcttgaattcattgcaaaacatggtgataacacttgtcatataaagtgttcgattttgagtgatatctttatcttcaagagtgagattgtaacacagaaatagcaacaatcatgggagtgagatgtctttaaaacggaacttgaaaagattttgtttcttttacgggctaggttggatttgcataaggagatggagaggcgatcattatgtgggagtgcggagtctaagatgaggcttatctccctattattttcttggagatggttttaatctggcagtctatcatcaagatgatgacgatcgaacccttcatattggcttgcaagcatttaaatttgaatcagatgagaatcaatgaatgttgcccttgacgcgatcaatgtcggcccaatattgtgggctgcctaaaggcaattttttggcccactagtataattagcacaataagattgggaattcaaaccgaaaacttcttggcggactttaacgaggtaaactgctgcactacaaagagtttcggtacttttgatgctcctcgaatcataataaaagttttgatgcctaaagacggagatcatgtacataacagattttttatgggtatctagaagcccaaaaacattaaattaatggataaaacaactgatttgggcctgagccgtatcattcaagtaatacttctgataccagtctctgatgacatggcagcttgtgattagttgggaaaacgtgtttttgtgggaaaggagagaaaaaaaaaatcatttgctcttctcttctctcctcttcactgcctcttgacccgattcttcttcaatggaagcgagaatcatcctccaaattaagacttcttggaaccctaatcgcaaattctctcctactcctttagatctatgccggaggcgcttatcttatgtttttctatatttattttcgattttgcaactaatttttttttaatgataccaacaccgatctcaccattgaaaacagatttatatcagtatcataaaaaatctcaaacaataaacaaactttaaaattaatagtaaaaaattgttagtgatactctatgagtaccaactatgtgcatgctccaaagcccttgctttttgggtttcaacccagatctgggtctagatgcaaatatactctcgctttctagatttgagttttatcgaatataccttctgctttaaatatcttttatttggagaagttcttcgattatatggataatctgttctcgcgtaagcgaacgaaagttcaattcaagatattctttagatactttggtatatgtggaaaactaaaactttttttcttttttttaagtcatcgatcgaacaactttggagatacatgatttagcagtcaataaaaagtgagatctaattcatagctaaggcttgagtggattgtcagagtagagatagttcaagtgatttacaaaccataattttcacattttatactgatggtccttaaaaacaaaaggattaaacgtctagtgttgcttggattcttcaacttcaagatggaacaaccaatattttaggtcttcaaaccgtcataggggcgtttcctcccttcgtatggagttgcatatatttttattggttgggtcaagcacaaataaggatcattttattttttttcgaataaggatcattattacttctctcgtttgttacaatttcaataaattactgcaaagagtaaaacaaccatctccaagggccttctcttccgagttgcaagaattcgagttactataagagaagactcattcaccggtccgaagaaaagaacgtttaggtagatttgttagcaaaacaagcttaactcattaataatttaatactattgtttcatttatcagcacttatgtttctttgttggtttgataatatacataattgatataatatggatttctttgttcgtgaaaaaagatttaaaatttgtggatttcttcccttatataagtgacattgcgtatttttttctaagaattactttaatttttaaatattactgccaactgttctatacttctattgactgaatattaatacatacatgcattgtctataagttgagataacatagaaaggaattagctaacaaattcttgaccacccaactttacgttacttttgaaacaggtccacatcaacaaactctccaaatacattgtaataactttaaatgttccctataaattacttttgcttttattgctattaaggagttagttaacatttcatttagatattatttaattatttcaaaatctttcttcattttctcctttcttacctcttatatattccttcttaagtatatctaaaagtgaaaagtttatacattactatatatttagcagtaatgttgtcgtattcatgttttgagaaaatctagtctatataaataatgcagagagaggactattaaaaccagtttaaaagaaagaagctcacaaacatctccgagaaatttagctctcttgttgtagtttggttttgtaatacgaagacgaaacaaacccaaacatttgtctggtgggataaggatcaggatcaggatcaaggtacacttttgttataactttctagtttgcaaacttttttttacttgaaagattcattttttctcttgggcacgtataattgattattttatggcgttttctggttgattaacttttgtgttgtatgaattatttatacatttatctaatgtgatgtgaaaggagtttttttgtgtttcaagtgcagtgacatgaaaaacacctatcacattaaaattaataaattttgatatgcatatgacaaatatttagatatatttttgttaccataaattttgtacctatatttgttatttttaaaaagaccatttgaacttccaaatgttgttaaaataggtaatacttaagcggggttatttgcctcgtcctgttaacctgctaaagtatacaactagaaaagtcttgacgagttatgtttgagttacttgattcatttcttatacgcttgaaatctaattattattagcttatatatatatataagtatttcttttgttgtaaaaaaaatgataagaatttttttgtcaaagctatatagttcttttcgagttgtttcggccactcgagttttggttggtaatttgattaatgtttcaaaatactatgtgtatatatatatattcagggtatttttgattattaaaaaaaaaattctctacttttatgcatactattcagtgttaggccaattttatatatttatattaaattggttaaaattataaagattgtgttatgttgatatgtcaagttatgttttcactcgtacattatctatcataacattaaatattcaggcataatatactatactatcatattcatatcaacttttttttttttcaatctttgattgtagggtgaaagacgaatttgtgggttataaaacaaaagctcaaatttcactatgacccgcagcagaaagttcttaacgaaaaagatgttgaccgagaaaatgaatgaagcgagccaagatgaagacaatgttgcattgtcgaacaccaaagaaacggagaagaagcagaggaagcggaagaaggattgcgaggaaaagaataagaagaagcgaaagaaggattgcgaggaaaagcatgagacgaaggaaatggagttagcgtggaaacctgaggattgtgctaagccattaggcgaagtgagtaaggttactgggaagggaaaaaagaaaaaaagtcatttcaaaacattcacgtttcgaggcaaccaatatgcgctggtgagtttcgttttacgttttgatttattactttaaaggctttgacatattaatttttaaaactggtttgcaaaaaaaatcaaaatacacaaacctatatatgtggacatggctggtccaaaaataataaaaacatggcgaatttaatatttattgtctttctaatatgttttttttcatttcaattataataatatcaaattcgaactttataaacttagaagctatttcaaaaaaaaaaaaaaaaacttacaaactatttgataatgagttatatgcaaaacaataattttctatatgtgtgaaacgactaaaattatatggatagccaaaagatttattttttccttcatttgtgtagttttttcaattgcattaccatttacattatatatcttttttttccccataggaggattcagtgcaattggttccagacgacccaaacagcaagccctattgtgccattataaaggttagtgaaaagaacaaaaaaaaaaattgatatgatttttagtttttaccttatcatttgatcaaattatttgttggacaggatatttatataccaaacaaagaaaaatacgtgaaacttgcagtccattggttttatcgtccagaggatgtggataaaaaacatgttggaaaatgggaatccaaagattcaagaaacctgttctacagtttccatcgtgatgaggtgtttgctgaatctgtgaagcacaagtgtgttgtgaatttcgtgccggaaaataagcaaatcccaaaccgtagagagcatccttgcttcatcgtgcaaaatgtttatgattttgttaagaagaaggtgaggaagttcactgataagaactttgacgtgcaccaaaagaatgagattgatcgtcttgtggcaaagacgagtttacgccttggtgatcttcctgacattgagaaagaccaagtgactaagacttcaaagggtaaaagaactgttcagagaaagagtcctaaaaccagtacggtttataagtcgatcttggaggattttgatttgttaaccggtgattcggatcgtgacaagcgattgggggagctcctggaagcagttaagcacgagtgtcgtacaagtaagaagaaaggggctcgtgatgatgattcttactggccagatgatgttgttccggtggttcgagctcttgagcatgtcttttatgattctatggcagaagatatgtcaaagtatcatcacaagttggagattctggttgatgaactcaaggttagtttaattcctttcactcatccatcctatatttttatttttgttttgcatgttcttgatttctatttatttttttgttaatgcatgttctcctgaaaccctaaactttgaaaaatatttcattttaaaatatgaagttttattcgtattgaaattgatgtttaatgtttttacttcacatataaaaaaatacttataggagttcaatttgtacatcatcccttcggaaaaaattcattatgtaatttggtgttacttgaaaagtaatttcattatgtaatttataggaatttagtatatcatctctgagatatatgataatatattttactataattaccttaattcacatcgattacatgaagatctacgctaataatcttgtttattattggagaataatagaaattggttgatgtgttctcagtttgttgcaattagtgtttaattgtgatctcttattgtatgtttgcagacgtcacgactgttagctagacgacttctcgatggtgaattaaaacctgaacaagtggtaaagatgacacgctatgagctaacggtaatctctttcattcacaaattttcttcacattaatttttgtacaaaaatctctaatgttgttatttatttggtctacaatatcacggcttaacctcatattatattggatttcttctagtaaaattaagggaatgtttccgagccaataccacaaaacctgaattttaatgtttattaattagctcataaactgctttattattaatcacatctcaagtgtttttgaaatgttaaagtgactatggttagcttttttgtttcccgacatcagcgtggtttcactttcgatgacataacggccgacttggaagagccaataatgaggaacgatgctccatccacctccaacaatgttgagcaaaatgaagattaaagaagatactaaaccttcaaataatatattttaataatatcttgttccaatctttttgtttttgtttttgttttccttgagttttctgtcaaggtatgatgcagaattgcagatcataaccatttatttcatgaattattatctcaaacttcaattattaaagtttaataatttctatagtgtcatatttgtaacatgggttggcatgtattcaattgaactatggaatacaaaattttggtttagtaatgcacgattttgtaaaggtttagtttcagtaaaggttgtctaaaatgatttaaaagcatgtacttttctaaaatgtttacacatcctagtatagaaatctttttaatattctaaaacacataaaacacgaggcaacaagtgtgaagaagacactaacatgagatcagctaatcgaaagaagcattaagtttccaaagtgtttcctttgtcctttggagagattgtgttgcgcatctcacgatcaatgaacttgaaagtggtgaggtgtggcaacgattggtgttgaagaatttctttacagttcagttttcctatgttgaaaattttcagttcttataacaaaagactaaaaaccttttactggggcctccttcacatacctttatatgtaagtccgtccatggccataatagcgttacgtataatttaatgcaacaaccagattgttggctgatcggcaccgacctgagatgtatcctcttctattctttcatcaatgacatattattttactggcctataagaaattaaaaaaaatatataacgagatatgttacatacttacatgtgaccgtttttacacttggttcacatcatttatcaatagaatataataagggtatatgccaataccaaataggagatttaaataacacttttaagttgccacattacatcatatatgaaactatataagaaagaaatgactaaggtttacctgatcgaagagatcttacttcttaggttccgttacgataactaagaaatgccatttttgttacaaatatatgtggcatatagttaacatgttgctaagtaaaacatatatatacaccaaatctacttgcgagggcggagagaaatacgaaaattaatcctctcatgattgaaatcaagtttgaagaatgatggagccgacacttttgttctttatgccaagatccatgattttgaattcaattgagaattttcccctcatgtaaccaaataatctccctctagatttcataatgtcgttttcaaaactatataaagagttggagggtccaaagaggaatttgggaaccaattgagaatagtggaccagcttatatattgcaaaaatatcattagtcacaacgtctatacactgaaacacataaatataatgtctatgtcaatacatctatgtaagaacagtcgtgtcgagtgaatatctaatatgtttctattttgtcgtatacacttaaattataatatcaattaataaatattcacgtctccttcaaaatattccatactcattcatactataacactgtctccatctcttatacacacaaaaaaaaagtttagcatgtgctctaagaagatatgatatttatacaataagaaaacttcaaactatatatacgaattatagatctctactttatcattatctctcgtacctagatcgtagatcaaaagtggggttttaatgaaaccaattaagtaatgtaaccaattgtggacgtacgttgcgtggcatccatcctaccacaaataaagtgtcggagtattcaaatttcaaaccctaattagaaaataaaacctataggttacaaataaatgacactaatgggtgtgatgtatacttgtagtttaagaaagaaagaaaaaataccaagggggtggtgagcgtagtggtaatgcaaagggttggttcccttgtgccccggatttcaattctcctttgggacggagagacattcgggataggagaggatcggatgttctagagtctctaaaatcgcctaattataacaatctatgttgaccttaatatcatttaacctaagcacagaaatacttcccttgaatcaaacattacgtgtacatgaactacaacttttttggttttccaagattcgtcttttacgttagcccgacaagtagaaaaattaaataaacaacgtacagaaatggttgtcggttcttcgcaaatcccacgagtgtgcaacgaacattggtataagaaaagtggtagtaatattttaaaggacacaactatatgcacgattcacgagtggaccaatgcatgcttaattaatgcagaagatggatctctctctcttttctttgataaaaacaaaaaatgaaatatatatgtttgatggcaatattgtaacttaccgatattggggtcttagaaattacatgaagaaatatataaaaacttattgatgcatgtgaagatccaaatccgactcaattactatatcttcctcgtaattaaacttgatgccactgtcactgacctaaccttggatagaaagttaacaaccatttatggttctaacctgaagttaaaaacttacatagtatgaaacaactaaataacaatagcctttataaaaaaaaaatcaaaactagaaaacttttcattgtaatcagtggataactatattttagtttttaaattctgactaaaatactcttatgctacaaaaattttaaaataaacgtggtggtaatactttagatatttcctagtaacaaattttattggaaatgattaagctctttgatacaaactttgtttcttggattcagaaagttaagctctttgagaaatgctgtgaagtagtaacaaagtcatgtggcaaattagctctcttcacaatcctcttcatgttactctgtaaactctgttgcactaactgcttcactgcttttctctcatccgtcatcctaagatcatgacctctctctcttcccaatgaagaagttccgtaaatcggagctgagacttgcttccctttatccaccactctcaaacactctagtaccctcgaggctcgcttttgcgccaatggacttcctacaagtgttagttcaagcaatgaagattcaatacccgcttcaatcatcgcattacgatctccataacctttatgagccattaacataaggatgtaaaccgctttctcttgacattttattgaatcattccagttcaatacatctaccaatatgggaaacgcttcaaccacctccccgatcgctttccttccttcggggactgatactacattggttaagatggcgagaatcctctcgctcacttccatgtctcccaacgtgttcaagagaaaaggaatcagatcggtttcgagtatgaaggaaacgttttggtgatatattgaaaggttgtaaagagctcgaagagcgtcttctctagcttgtgagctgctagtttcctcgaagtttttaagcgttttcactagaaagatgattgcacccgaggaaccgatgatcggtttgttggaatccaacgcgcttaaccctaggaaattagcgacaatagcctccgcgattgcttgattaggaggttttgatgactcaactagctttaacattttgtgaacaacacctgcttttacaatggctgctttgttcctgaaattcagagaatttaaacatatgtcattgaaacaaatgattgaatttaatgcttggaactttttcagattcttgggttcagaaaaacatgtaactaaaacagatcaaaaccaaggaaaagtattgaaagtgacatatctaaagataactattaaactctatctatcatttcacctaaaaaaagtaaaccaacaacaaaaaaaacattcacaaataaaattcacaaaacctaatgagagatttgaaatgcaagagaaacatgcaatgcaaaggaaacaaaactcaaaatctacttgaagaaacttacacatcattgccgattccgaggttgagaagagcgtaaagcgaagcgattagcgcatcttcgctttgtgactcgtcgtcgatcatactaaccaacggcgggatcgcaccaagcatcgcaagtgttactctcgcctctatatcatcttttgctaacaacctaacctcactagccgccgctattttcttctccgccgcctccgcctccgcctccgcctccgcttgtaaatctttaacaacacgttttagaatctcaagtgtttcctccttcttcttggtctctacaccactctcaatcactgctaagtttaacagatcgctgagcttctccggtttcctcattgaatcctctccgatgattgtcgatttcgaacaaccttcgtcgtcttcttctcggagttcacgtcggtaacgagagctaccgccgcaactaatggcgtcgaagatgatcctgcgcaatgacgatccggagaaggtgtttccggataaagaggaagaagaagcggagggaatacgatggagaatgagaggatcaacattgttccggtgacacttcgccattatcgccgatcagttctatagagcttgaggaagcaagaaagagagagggagagagaaaagagtttgttctgtttggaagcgaaaacagaggaaccaaaatgattttaaagagatttatcgaatattttacaaaaacaatattgtggagatctagagaatatttaattttaagattgagaatttagaagtttcacatttatatatagtcgggttttgggtagttttgacgaacataacgaacgtatatcaaaattagttcaatcattcaaatagtaaaaatatagctaaattttgattataatttgtaggctcatttcgcaatttcaaaagtacaattctaagaaaacgataattgtttagactccatgtaccaggttgtttccctcattgcatgacacgaccgacatttctcagtccctaactaatactttatcactagtaagaatactaactcgtttaaatatcagacacacgaattaataagaaacttacttaagaataaacaaatacttcaatgtcggaagctattaaagagaaggatccgaatatccgattcaattctagcgacatgagaacgtggttaaaaaaattattattccaagtcaaaaacgtttcttcaattttgattttgtaagatttgtaatctccttacttgaaaatcagatctgtgacaaattctaatagtaccacattggtacgtgagtccttaaaagctccataaagttcataatttcaaatgctaacggaggaataagtcggtgtgttcccatttacttttgtcggcaaaagataatcctcaaaacattacattccgtacgagttagaagagagagcaacactaaagtacgaatctacaaaagacagaacaaaagagttataaacgctaaaccccgaatcgtctaattttgtttgtgcaattaagcggccatttcttcagctgaagcattactctcaagcttcttgataaccaatttgttgtcactagccaagtggtcaacatcgacaagaacggtatcttcttctgcaaaatctcctttcaaaatcccgacagcgatctcattctccaccatctgttgaatcactcgcttcaccggccttgccccgtagttagggtcaaagccaagctgagcaaggagatccactgcctctttggtatactgaagtttgattttcttctgttccaagctattcttcacccgtctcatctgcacattacacaaatgtaataacatgaagctaatgtctttagaagaacaaagattctgaaaaaacaaagtgggtttaaaagggttagttacctgtaactctacgattttggagatttcgttagaatccagcggctggaaaactatgtactcgtcaattctgttcatgaactcaggcctgaaattttgtcttgctaactccacaacttgccgcttcattatctcataaactgcttctttgctgtcttcattgttgcggagggtctcaagtatgtggtgagatcctatattcgacgtcataattacaacacagtttttgaaacttacggtccttccttgagaatcagttattcttccatcgtctagcagttgtagcaagatattaaagacatcagggtgggctttctcgatctcatcaaacagaaccaccgagtaaggtctcctgcgaacaacttcagttaactgcccaccttcttcataaccgacatagccaggtggtgcaccaacaagccgtgagactgagtgtttttccatgtactcactcatatcgaccctcactattgcattttcagtgttaaaaaggtatcccgctagagccttggcaagctcggtcttaccaacacctgttggacccatgaacatgaaactagctattgggcggttaggatcagaaagaccagcccttgaacgtcggatagcatctgctactgattttacagccatgtcttgaccaataactctatggtggagcacttcttccaacatcactaacttctctctctctgattgctgaagattagatagtggaataccagtccacttgcttactatttctgctatgtcaagatcggtaaccacttctcggagtagtgactgtccaaactgtcggaaattcgtgagattcttctcagcttcttctaattggcgttggagggacaaaagtgttccatacttcagctcagcagctcggtttagatcatattcacgttcagcagattcaatttcgaggttaactcgatcaatctgtaaaacatagaacatagaaaatgttacggaggacattaacgtcgacatataccaacaacgaaagcaaccaccacaagtactaccactaaaagtacgaatttagaacaagaaactgcagtgtgtcttgtataaaattatttttatgagacgttaagtcgaaaaggcatagtgattgagaaagattttacctcttccttaaacgaacgtatttttgtcatgagcgacttttctttctcccattggacattgagttctttctgtttctgtttgagcgtggacagatcattctcaatcttctgtagccgttctttagatgctttatcagtatcatttttaagagaaagcttttccatctccaatttgatcacagctctatctattccatctagttcagttggtttagaagtgatctccatcttcagctttgcaccagcttcgtcaacaagatcaatagctgaaaaaagaacattcatcttagaaaaaaatactatggtcaaacacttcccaaagaaaactggttgtaatcagggaaagtgcaagtccaatgtccatacctttgtctggcagaaagcgttcggtgatgtagcggtctgcaagaactgctgctgaaacaagggcactatctgatatagtaacgccatggtgtaactcgtaccgctctcttaacccacgaagaatcgagattgtatcttcaacagagggctgaacacataacacttgttgaaacctacgctctagagctgggtctttctctatatatttgcggtattcggtcagtgtagttgcaccaatgcatctcagttcacctcgtccaagcattggtttcaagaggttgcttgcatccattgctccatccatagctcctaaataagagtaaatagcagccaattcgttagtttcaccttaccaataacaaagtactaaagtgagtcaaaagaaacaagattaacaatattagtagatctttcaataaaattttccatctccaatttaaccatttatttggcgatgcaatgttcttctactcagccacattttaaccatttattatgcatatgtacatgtatcgtgtataaaaaagatcatcaatgtttaaagtatgtggataaaatgaaaaaggtacctgcaccaacaacagtgtggatctcatcaataaacaagattgtttgcccattggaagcagatacttccttcattactgctttcaacctctcctcaaaatctcctcgaaatttggcaccagcaagaagtgaacccatgtcgagagatatcaactacatgatagagaaaccaagccaaacatgttagaatcttcctccagcctttctacgagaaaactgtggtccattaaacaaaacagtccaaggccaaaaagaacaagaagaaaactgaagcaatttactggaatgaacctttcgattcatgagaggttcagggacatctcctcgcacaattcgttgagccaacctgaaaagattaaaatttggcagagtaagaacataatatttgataaagaaaagaaaaacaagggatataactacaagtcttacccctctgcaattgcagttttccctacaccaggttcaccaataataaccggattgttttttgttctcctacataatatctggatgcaacgcctaatttcatcatcccgcccaatgacaggatccagcttccctcgtctagccatctcagttaaatcatttccatacttttcaagtgcttgatatttgctttcaggatctacatgtgtattagcaaaacgtgatgagagtaggcaaatgtcaccaacacacgtcttacatctacttaccaatgttcacgaattcaatgtagaacataagaataaaaccatcattatttttccagtcaagtctttgattgtcacaagtagcatatataaaacatcatctacacagtgtactagctatattcgaagtaacttactccgatcagttactcgttgatcaccgcgtacatctttaatagcatcctttagcacttgaatatcaagtttcatgtccctgaaaaactcttgtccaaaccttgtatctgaataataagccaacaaaaagtgctccacggatacataactatccaacatatctttcttatgcctctttgcattttctaatataacactaagagatgaccctagtctctgaccacttgcatcactaacctgcaacatcacaacaacttaaattgacctgcaaaattatgttctgatacacagaaaaagagagattaagcgcaacaccgtaccgttggttgtttagatatgaacaagtctgtagcttgaagaacagaggaattgtcaattccagctttagtgaaaatctttctagccataccatctttttgctcaagaagagctttcatcaaatgttcagattccacaatctgttgtttcgattcacgagccgcgtcaaaggcgttgataagcccttcccatgccatctccgtaaactcattttgattaacctattatcactaaaccataaaattaacagttccaagttcacaattgagcaactaacactgaaatcgagcacgaacctgagctgtggtagtacaaaagcgtcgcggagaagaaagagggaagagttgaccatgagtagtagtcgcatgagtgatagaagagttattgatttttccgatgaatgaatttgttggccggccaatagaggtgtagtgaggagaggaagagagagagcgagaacggaggagaggagagggtctcgagagagtgtattgagctttgatggctgacgaaacagactttgataatctccttagcgccatgtgagtaagaagattgaaggaaatgagggtttttggtttagggttatgaaggaggaggaagaagacgacggaggttttttacatggagacaagcgtaagcttggagaagagggaaaaagaagtttgtagaagaaagtcatttcatcgagaagtttccagtgatgatccaccactgggtttttctataggcaggctaatacctaaaccgattttcggttcagtttagcaatttgagtcttttggtatagtagtaaaccaagttgcatttgttttattaattctagttttgctcgaaaacctccctttttttgtaatatgtttaagaaaattttgcttgtttcattatatttcacaacaaatcaatttattatcaatacatatatatgtattattctttattcattattcatgacatgaacagattaagtattacatgaacatattgagtattacatatattcacccgtgaatatatttacccattattcactgacatcaaatgaaaagcattcattaagacattaacagacatagaaaatcattcaggcaccaactaaagttagttggtatcaccaaaataaagttagttggtatcaccaaaataaagtttcttcatagtagccatctcacgcttgaattcaaccattgcgtctcgtggcaacttcatgatcactttaactccaccttccattgatggatccgattttgaaggtttcaagatcatccctacgtgcactgtgctctcccgctgggtcaatggtcgtaaattcactggctcattccaaccgaaatccattgatccgaaccaaccaatattcctccaatccgtcaagaaaaataatccatcgcttaccccttcgaacattgaatcatctctcatcaatctctccgtgttctttagctcttcctcgatataccctttttcataggctgttttcttggctttcttcacacgattcgcgatgttagagattgatgattcttcgagttctctcacagttagctcgacgtagacgtctatgtaagcgttaccgtagtatcctttaggaagtggtgggtccaaaacatgtcggattccaacagccacgccgaggacagtgatcccgtcagggtttagttttagggctcgagatcttaatttccatatgtatgaactaagtacttcataagtagtgaaactctctttaaggtactcacattctttcatcatagagtctttaagcctttttatatccccagcacgaatgtttattgtctctgtgacctgttggataataaataaataaaaatcattaacctaattattacaaaaataaatatttgcaagatcttctaataagctaaatcatcacttaatatgatattaatagctgaatcattactttaattatatgatattaatttgatacggagagagtataaaataagcttgacaaaatgacatacgacatcagtagttggcaaatatgctgaggtggccaaaaaaccatcaatatggctaccgggcactttgcctggtttattgtcaatttttccgaccagccgctctctctgccacactgacttcaccgatggctcagtctttcctgcagccaactcggtcaaggcatggatgatctgagccacaccgtatccatcacacacagcgtgtgtcaatgcggtgccaatggtgaatcctccacaggcaaacttggtaacctacaaaagaaacaaagtgaacaatatattatcttgattatgtattgataatatattcaatgttataatattttggaaatctataactttcaatacatctagaaaatgaaaacatacctgcaaagctagagggtgataacaaacgttgctctcgtagtcgatttcgatttcaggtacaagccgcaaagcaacttggtcatcgaggttttcgatatagttcagagaggagaggtctagagttgatgtagcgacttcaaatggaactccctcacccagataaaccaactggagctttccattactctcacttctcatcagcttgcccgaaagagggtagtaatgcacaagaagttcggacaaagccttcctaagcaaagagacaggatcatctaggttctttccattggctttgaaaacgtaaatcgttgcatacataacttcattgaaaggatcgttgtctaaagtggagagggaaagagtttcacaatgagtgtgttttgagggtttaacaagctcaactggtttcttttcaagtaatagaggaaggattggttttctttggtttgccatctcttaccaatgttagaatgtataatgtaagatcttctaacctcgcgatgctgtttatatatagtgaaggcttcatgcctcctgtatttaacgtaatagtaggatgtaacaagttagaagtgaataaactataatgatatatattgtaaaataattttgttttttgatatcccagctggttaagccaaagtaaaatattttgaaatcgatagaataatatattgtcatgaacttctaagtaaaacgtgtatatataaaatattaatcatctctatataccctaatttataaacgtatcgttttcacacggatagtataatacatgattcacattattgcgaatacatgaatagttaataacaacatctaatttaatatgtcgttttcacatgaattaacttgatatagcgtcagctaaacgaacttttcattgttgaaaaatattatattgtctcttgcttaacactatcaattatctaattttattttattttggaaaacccattagttatctaagttaagactacaaaactgatagtttatagatcattgagtttaattgaattatatataggttgattttaagagaaattgttctttaaattaaacactactccctctatttcacaaagaggtcggttttgagtttttttttcaaaaacaatattgttttacattttcaatgcatcttttgtaactaattttcagatttatctcttgtctaaaaccaaaaaaaaatctttttatttaagtcattatgatatattaaatattagtatgtttgtacatttaaataatttttttaatatatgtgaaatgtgtcaaaataactgtttatgaaaagagggagtattactttatgggttaattaattttttctcctaaaaatatttatttatagagatttattgtatatatagtcttatccaatgacactaaaaattattcaaaaaaatttgattattaatattttatatagtttaagacaattagttacctattgtcttaaactagttataatagtttgttgtaaaccattagtaatatgttatcacaaaaaaacataacataaataaaatgaaactataaaataaaaaatggtggaataaggtattgtaattttattaaataaattattgtaaatagtaaaaattatgtaggtgttaaataatgatgtggaatagagaaaaaaatgatgtagagtattaaaagaaaaaaaaatggatgttgtaaattggtcttcctacataataacagattttgttataaaagtcgcattactatattatcatctgcatgacccagaggacagctggtgtaagagagccgttgatatgatttatccgttcgtcgttggtcttccactgactctatatagccatgcatgggacgattttgggttttaaaattagaatgttgttatgtgattttttcttttacatttcaaaagtaatatgtgaaaccataaaactggatcaaagataataataataaaaagaattagggttgtggttttttttgtgaagaagttgtcctataaatgtaaaaccagtcgaaatggtttattttacaaacctttaaaacatttcccaatattttaactattatcatcaaattatattttaaaattcaaaaatattctatgattgaataatatagtatatactattttcatgcaaatcaatgcagaaataattgaatacacattcatgatctaaccaaacatattgatccggtatcccttgctgagaactctttcagatccacggagagaaacgtgacttcacccctattggcggaagcaattgccctccttcgtgcccttaaccaagctgtagatcttggctttaaacaccttcatgtagcttcagattcgcttcagctaatcaaagcactcaattcggagctccaaccaaaggaactttatgggattctccacgacatctcacttatttctctctcttttgatgaacttcacttttgttttgtgaaacgtgaattgaattgcaaagctgatgggttagctaaagcagctttgcattcactctcaattgtaccggttcccaattaatgcaaaccaacattttcgacaaaaaaaaaaaaaaaaaaaaaacaaacatattgatcctacttacttagagttataaactatattctgaatattattagttcaatgaaaggacaataaataactaatataacaactcaaagatccactactaaatagattaacagcttactaattcttaaaattctctaaaatcccaaaataaataaaattctctacacaatattcgaaggaagagtgttatatatacatgttacaaggcatcaatatttagaaaccgtcggctgcatggaaatagccatcctcgaatctaattgtaaattgtgcatgtgagttttttttcaaatccattaaaatttctgactaaacatttttttttttttggttaaatttgatagcaaataaaaagactttgaatactcagatgtaactattctgaaaagttttgaaataattaatgagaagaatttttaaaaaataaaaagaattagaagagagcagaaaaagaaaaatacaaatatagcttaggctatggaagtatggatggaaatgaatttgtcgcaaacagttttacgaatagtagaacagttctgtggcaactgcgttccatccagatttagtaaatggaactttgtaagtatgaattttacgactaaacaaatgtttttagacatgataacaaatacaaatttagtagtcaaagtggtctaaccattactctatagtctataaaaagaaaaaaaaatatgacacacaaaatattattggaggcaagaatcttttgcttacacagataatcttttgtggatctgacacatgcatatatagccaagaacttccaatgcacctcagacttataaattgaaaaattagaaacgaacaagataatcaaaaccatatcatggtggttagggaatacattcagtaccaactacgatttcatcgagttagagacaaagaagatatctcggtagttatgcaataaatattattaatgaatatatacaataagttatggaatattatttttaatgaatatatacaataagtttaattgatttaattaaagtgacaactaacaagatatatagtatttgattaggtatagttttctcaaaatgtaacgtgaaacttcttgtcgtatgtctattatggattaaggtagtagatagatttgcatgaatttgaattatgacaatacatgtttcaaccatgtggttcaaaagtaagggtgggcaaaacaaatcataactcaaaaaaccgaaccaaacttaaccgaaataaatgatttagtttggttatgagttagcctaaaaactactagattatcaattttagtaaggttttggttaatgtttgatttggttaaaatctgtaaaaccgaatgttttttttggttttgaagaaaatttcggatgatcaaatatagttatatttttcagtttctattgtgtttaagaatattttttttattgggcttataattttgaaattctattctttgaattatttgggtatataaactaaatttctattctactctttaaattatttacagattgattgatatattatttatattctacgttttacttttaaagttctattatgcagtaaacaagtatatatatttttgtataaaatatgaaataaccttaaaaaacacaaacaaaacaaaaaccaatccgaacacaaatacatataatttttatacagttttatttattataaaatcaataaacagtaaacatcgtaaaatccaaaccaaattatatcgatctctatatgattttagtttttgtaaaaaaaaaactgaacctaatcccacccctaagttatttaactatattaataatttaatagtttgtaagagatagaacatatattatgtaagaagctaagaaatataatagtgaaatctttaaaaatcgttgtttaacagttgttgataatttatgtgtctaaaaggaacaagtttttgtccttatactggttggtagttgaaacacgtgtaatacactgggatatgcattaataatatgcttttatcctttgtttaaaaaattactaagcgttaatcacataccgtgtatgaatttagcgattaatagaaaaatcggattaaaatagaagattaataagaattattttagagttattttgatgtttttcaaacatattaatctaatatttttttcaaaattataataaatacataaaactctattcttaagacaaaagtttatgtttttattaaactttttgtaaaacatcacaaattttaaaactaaatgattgaataacaaaaagaaaaattgttttatacttacaatctaaaaaaagttaggatatgcaagattaggcggagattaattggaaataaatcagattaaacgaaaaataataaaataactaactttttaagggattagtcattagtcgaggcaaatagaatgagtctagtgattaaaccgagattaatcggactaagcggggatttttagaacaagacttttatctatgtgattatgatcatacatttggttggtgattataatcaaatgtccacatgttaggatattcaaaaagtgtataatttttttcatatatgttcagcgtgtggtagacttcatcatatgataactctctactctatatcgataatggatgtgcttttcattggattgaatatctcgagtcaaaattcactccccaaaatttacaatataaataacttattgataatttcaacaaatttatgatagaaaaatttacgataaccaccatattccaaaatacttattttcatgaaattaatcttccacaaatagcataacaaatttaaaatcatggaacagacccggcattgttttgtttaactcagtggccacgaacaatgtactaattatcagtccctatatgatccacttcatatagagatttatgaagcctaggaatgatattgacttcaagaggggtggctttgtgattgaccaatccattgctctcggtcatgtccacatcttgactcgatggtcttgccaagtcaaagctgtgcaaaaacctgactaggagatagtgcaccatcctcatacctagggggattgcggggcatgaccttcgtcccaacccaaatggaaaaaacttgtaactctgcccgccaacatccaattctctattagatgtcaagaatctctctggctcgaactgttcggggttcgaccaaacatttggatccctgtgaatcttccatgcactcaccatcaattgtgtccctgaatagttaaatgaactatgtatattagagatgataacattcattctgatcatatttgttgaacttttttttatttttttaataccagaaggttatgaaccaaaacccataatccctctactccggaaaccacaacttataatattagtttcgtctaaaacgtcactcgaacatgtgatctctaagcttcgcgtaggatctttaccagttgaactaacgacatttggtaatatggtaatatttgttgaactttaatctcaagattaattggtaatgtagcctttgattacctgcaggtacatgacatttgcaaaatgcaatgtcgaaatcttccaccacagctctgtaagcaacgagagggactggtgggtatagacgaaatgtctccttgacaatggcttggaggtaaaccaaatctttgatgtctaactcttccacaactctctcctttccaattttgctgtccagctcctcctgagctttcctcaagacatgcgggttgttcaagagcaaggataccgcccaaaccagaaccacaatggccgtctcgctccctgccaataccaagttcttgcaccaaaaaatgttcacaaatataaatttcttgattataaataaacttacaaatgtattaaaattttatattatagtttatgtatataggtcttacgaggcagagggctttaattttcgtgtgagtatcactcaaaccaggaatcttgtcttgtcccaatatcttaatgagtatatccaagtagtcattttcactcctaccgtgatcactcctcttgttcttgtgttcttcaatccaaccttcagcaactttatccaaccctttagccgttctcttcattcctctcttggtcttccaatcaagaaaacctagaactggtgccacatcggacaacaaaaatagtgcgaagtaatccaaaaactcccgaatcagcttcccgcatctcctagcttctttcacttcgcagttcgggttttcaccaaagtatctcttccccgagaccatcatcaatgagatgttcgcagttagatctatgaactcttgcttcatgtccaccaagactccttctttaggcttacctcttttctcccatctaacgtataaggctctaaatgccaagtcagcctcacgtgctctactaaccatgtgcatatcaaccccggatgtcgagaaaagctcggatactgcaatcttccgtatctctctccagtaaagaccgtaaggactaaacgtcaagaacgagtcgttgtagcctagaagcttagacgcagtaagttctggtcgttctaggagcttgtcgtggaccgtgtaaatctctttggccacttctttgctgtttatgatcatgactttgatagagccaagctttgccatgaacaccggtccatacacgtcagccattgccccaaacgtaacgtgagtcgggtttacggtgtcaaataaatgtaaatgaccgagcaatggccatgctccggggaccataggtgctgtactcttcttgttcttgggacgaagccgagacttaattaagattaaaacagggaagatgaagagagcagagagaagaaaaagcatgattagatccatgtatggctgatttgatttgtgtttgatctacttactaattgggtctttattatatataagcggttcacctaactcctacattattttctaaattttagtttatgaataattctgcaaaatgttttttttttttaaatctaatggtgatagtatactcgtacattcactatctacaatcaagaaaaaatgtctcttttactatacatgtttctattaacttttcatttcctcaccctaacatcttgactgctaaaaaatgtcaataaaaatacaaaaatgttttctctctttcgtcttcataaacatttagtcattcttattttcccttttttttagtttgatttgttacaagaataacatttttatttttctgtgaatataatgaatacaattttattatattttaagttattttagtttgacggagtataaagtagtatacaaagtcgacgtacgacgataatgtacaaaacaaaagaaaaaatgagagctaactacaccaattatatgtatcgtatatccacgtataccaaccaacatatatatgacatggttaagcgacaacattttttacacatgtaactattataaatttttagtttatagcgtttacaaagacattatcataaaatttgattattacatgactgcataatttaacaaacatagaaccttattaaaatgcatgttccagtgcaatacatgtggattgatgttgaatgactctaaaagatattgttatgatacaacagtatctcaaaaaagattcagaccaaatattttattgttttaattattattattatttttttttttctataaatccgatatttccccaaaagccaaaagggtgatgtgagaccgttatacttgacatattttatatattttatttatataacctattttggatcgtttccaactataagatatggggttgataatttttgattgtacatgaagattttgtgtcctttgtattgtattctatagtcgaacttggaccacgtgtaataacaccggagcacgcattttataagctttatgctagtatccatacgattaaattatagttcatcatcatttgttatactatatattgatgtcacataataattcagatttaaatatggtaatgtgtttgtgaactatccaaaaaatttcaaagaaatataccaaaaatttaatagttaaaatctgaaaacaaagcatgtaatttaagctacaattgttattacatattgtaagggctacgcaattagttcttgacagttggttgactacataacacttgctgaaacctacgttttagcgttggatatctctctatatatttttggtcaatgtcgttggagattgaatcctagattaaatcctacaagaagaagaaagcttcatgagaagaagaagatgaagaaaagagaagaagccaagcttggaagaagagaagaagaagatgtcgtgaccaaaggaggaagaagagaataagaagttgtcgtgaccactgaccaaaggaggaagaagagtcaacgacacaaatccaacataagaacggagttggatttgtgttttgtaataaggccattgggccgtaagtgaattatagccccacaagtgttagtgggtttggttggttaagtttaagctaaataagttaaggtggatataacaaacatagttgcaccaatgcatctcagctcacctggtctaagcaacggtttcaagaagttgctcgcttctattgctccacgcctccacaagtagctcctacacaagagtaataactcattagtatagagacacaagattatacaagaaatacttagtagacataattgttcatctccagtgttaatcctcaataattgttcgatgcagtattcttctaatgagatgaaaaatcatttttatagagttaccacccatcaaaaccatttatacaaaacgttttacttggtcagagtaaaaaaatgcatacaagtattgtgtataaataaaaaggtcatctattaatgtataatctgaatcaaaaaaagaaagagcacctgcaccaataacaatgtgaatctcatcaatgaacaagattgtttgcccattcgaagcatatacttccttcaatattgttttaaaccttgtctcaaaatcttctccataattagcaccaacaaggagtgaacccacgtcaagagatttcagctccatgataaatagcgaaaccaagcaaagcatgttaaatcttcctctagcctctttgaggggaaaaggtaaataaacttaaatatttaaaaatatctaagtttatataataacaatattgggtaagtgaaaagtaattgtcattatttttgacacttatttttataagttagaagtaattataattttttcaaacaaaaaagtaagttttttgtgtgtgaaaaaataatgatattgagaaggtaatttaattagaggtgatattttataccttaagaagtgtattaaagttaataataaccataagttaaaattggtaagctaaatgttagaaatcatttgtgttgtctgaattttcaagtttcgttcgtttcggattactttcttcttctgcaaaaacagatcccaaccatttcaaaggttcgtcttctccttctcttccacactcttctctgcttcactttttactctatcttcgactagtaatatcgctttcgacttctcaaattacttctcaagttactatttttctcttcctttctttcaaattttcgttacaaactgagtttgaaactgtttgggttttgtaaagttttgatcttttcatgatattgcggtaagagattgttaattcgacttctgggtactcacatttcgatgctcaattgtttattcttatgggtaattttggctagggttttttccaatttctctctcgttctctttcacaaggttagtcgatcttgctcatgtggtatagagtttgatgaatcgagttgtttagtagctattgtacgaactatctcttgatatagttgtaaaggttttagattgggaacaaaaaatttcactgtgatgtttgtttaggtagtagagttcaattgtgtgaaactctaatttcatagtttgcttaagtctcagaactagcactgagtctattgttatatgtgttgtttatgtaagtttgttgttattgatgggagatatgttttgtgtgcagaaaatgagtagtttggtggagaggcttcgcatacgatctgataggaaaccagtttataacctagatgattctgatgatgacgacttcgttcctaaaaaagatcgaacctttgagcaagtcgaggctattgtcagaactgatgcggtttgtttctcctctcgagcttattgttcagcttttactgttttatgtgttctattttaatccttttttttgtgttgttactctgaatttgtagaaagaaaatgcatgtcaggcttgtggggaaagtactaatcttgtaagctgcaatacatgcacttatgcgttccatgctaaatgcttagttccacctcttaaagatgcttccgtggaaaattggagatgccctgaatgtgtaagattttagttacggtccacaattatgttttgggatgctacaggttccatttttcttacatggaagaattgttgtttacatttgcaggttagtcctcttaacgagatagataagatattggattgtgaaatgcgtcctacaaaatctagtgaacaaggttcctccgatgcggaaccgaagccaatttttgtgaaacagtatctcgtgaagtggaagggattatcataccttcactgctcttggtagttactgcgtgtcttttttgctgtctggacacgctaattatcaatgtttctttctgtgaacactataatatgtgatttatttccttttactaatcatagggtgcctgagaaggagttccagaaggcttataagtcaaatcatcgtttaaaaaccagagtgaacaattttcaccgtcaaatggagtcattcaataacagcgaagatgattttgttgccatacgtcctgagtggaccactgttgatcggattcttgcctgcaggtctagagaatggaattaattcctttatttatctatctgccaactttttttttaatatccttgttttcagcataatccattctctaataaacacgtatctttgatagagtgctgcttaacctaaatttactgttatcacgattttgggtctctgaaacatgataaatgacctgcttaccttttttttcttctttttaagttaccattttcttagttgtttcgtaaatcaggaattgtgacagttgcattggtttcttttatgatatagagaggaagatggggagctggaatatcttgtcaaatataaagagctatcctatgatgaatgttattgggagtcagaatcagacatctcaaccttccagaatgaaattcaaaggttcaaggatgtaaattctagaactcgcagaagtaaagatgttgaccataaaagaaatcccagagactttcaacagtttgatcatactcctgaattcctcaaaggtatttggatcaccttaaatcatatactataaatgtttcttatatttggtacttatagatgttatgatttatttgtttcctgcgattgaaggcttgttacatccataccagcttgagggacttaattttttgcggttctcgtggtcaaaacagacgcatgtaatccttgctgatgaaatgggactaggtaatttttcaattgtcccacttgggtggtcacatagatcttttcatccattgtaaggggcctttgttttctattcctgtaatgttgtgagatttttcctgttacaggcaagacaattcaaagcattgcccttttagcttcactttttgaggagaacctcattccgcatttggtaattgctcctctatcgactctgcgtaactgggagagagagtttgccacatgggccccacagatgaacgtggtatgtatgcagttatacacgcaatgatctgtgccatttgtatgtttttgttgtttgttaatggaatggtcttcgtggtcatttgacgggtaggttatgtattttggcactgcgcaagctcgagcagttatcagagaacatgagttttacttatcgaaagatcaaaaaaagatcaagaaaaagaaatctggacaaataagtagcgaaagcaagcaaaaaagaatcaagtttgatgtcctcctcacatcgtatgagatgatcaacctagattcagcagttctaaaaccaattaagtgggagtgcatggtaactcttattctctaatgagactttactttctcttagtcgtctctctttctctcttacatgttgcctagtaacaattgttttgggcagattgttgatgaaggtcatcgactgaaaaataaggattcaaagctgttctcttcattgacacagtattcaagtaaccaccgtattcttctgacaggaacaccacttcaggttcgtcatttgagtttgatttctgaagtttatactttcaatagttgtatctgagcatagtagctacgatttgcaatgagaattgttatatattatcttgcactaatgtcttacctgattagttgcaatatgttactgatgattatgtggtgcctttacagaacaacttggatgaacttttcatgctcatgcattttcttgatgcggggaaggtatcacaagaatagcaaagataaataagttcgcatacttaacagaattttatgtagctaacatgttatttgattgcacaatacttgcagtttggaagtttggaggagttccaggaggagttcaaagatattaatcaagaggagcagatctcaaggttgcacaaaatgttggctccacatttgctcagaagtattaaccaaaactatttgttcatcttttttaatttatatgtgtttcaaaagtttggttggagggaatctttcatagtaataattttatgatcttaaccatgctgtctcgtattttgattgctcttccaggggtaaaaaaagacgtaatgaaagacatgccccccaaaaaggagctcattttgcgtgttgatctgagcagtctgcagaaagaatattacaaagctatttttacccgtaattatcaagtattgacaaaaaagggaggtgctcaagtaagttctttttaatttttgtttacactttttggatcattaaacctcataggtggggtagaaaccaggtcaactgtaatcgtctagtgaatgtattggtctatttctgtttcagatttcccttaataacattatgatggaattacgaaaagtatgctgccatccttatatgctagagggtgttgagccagttattcacgacgcaaatgaagctttcaagtaatatctcatttcccaaaaatggttatctgtttattactacttattaaagtcgtctgctaacttttgcgttgaacgttttcttatatgtatcaaagacaacttttggagtcttgtggaaagctgcaacttctagataaaatgatggtcaaactgaaagagcaaggacacagagtcctaatatacacacagtttcagcatatgctggacttacttgaagactactgtacccataaggtatttgaacttcttatatgtacagtctgtttcagtagattttcattcttgttgtttttgtagaatatcattttgacactgtagaatcaactctaccattttctagtgttagagtacttaggcacaattatggaaatacaagcatgtgctgaaattgagagtatatgagcattctgtgcccaactgaaagagcaaagacacaaagtttccttataaacacagtacaaatcacaagtttagccatcttctatgtacagtagttttccaataggtcgagcatgtgctgaaactgtgtgtacagagttctcataaacacacagtttcagcatatgctggatctacttgaagactactgttcttataaggtactgaacttgttatctgtactgcgtatatacgagatctctgtattcttgctcttttattttgacactttgttctcatatacactcggttcagcacatgctcgacttactgcctaaggatcttgaaaaaggtagagttgattctatgtctaggtgcaattactttcttagaatttttgtcattacttactctgttggcaatataacttctttattccctcaaagattactttttttggtttcttgaaatgccattatcaataccattgcttttgctgacgcatgcacttgagacaacttgtttttatctctttctagcacatttttttttaacatgcagttaaggaaaattctcatatgatttacgctgttcattttcttgtctttgtcagaaatggcagtacgagcgaattgatggaaaggttggcggagctgagcggcaaatacgcatagatcggttcaatgccaaaaattctaacaagttttgttttttgctctccacaagagctggtggcttaggaataaatcttgcaacggctgatacagtaatcatttatgacaggtttgaatttcagcttctcttagtgtcatctgtactcttttcatagttattgtgtcaagctgtaagaggaactatttggcttgatagcataatattttggaagtttaatgttgatttttaagtgaattgggttgtgatgagtgataaaaaggcacttggcttttttccaataacagctatttcttgaacatggatgttctaagacagcaggaagatcaggaaaattattaaccgctatcttgctaataattagattttgtaggcatgcaatatgggtggcgtccatgggatcctgcttggatggcagtttgttttggtttacgcctgttcacattttcatacgtacgattgaaactgttttatctgtttctgtagtgactggaatcctcatgctgatcttcaagcaatggctagagctcatcgacttggccaaacaaataaggttttaaattttatctcttagtgctgtcaacttgcaattttgtgttcttttttgtagtttccctaattttccttatattttcctttaggtgatgatttataggctcataaaccgaggcaccattgaagaaaggatgatgcaattgactaaaaagaaaatggttctagagcatcttgttgttgggaaactcaaaacacaaaacattaatcaggtaaacttttattgcttgaagcctttttacttgattacaaatttctcaacggattggagctggaaggtagaaattccaagaagaacaccttcggttataacttataagtgtgaaattaaaagataaaaactttagagagaaggggtccatatttgttaattgtttgtcactaagtatgtgtttgttttgttttcctgactgcaatttaggaagagttagatgacatcatcaggtatggatcaaaggagctttttgctagtgaagatgatgaagcaggaaagtctggaaaaattcattatgatgatgcggctatagacaagtaatagactccttactcttttcctcttgttttgtttttgattaacaaggatatctgatctttccgattgctcctttcttatgaaagcttttgcagtcaattgcatgggcgtatttcattatttgtctctatcttctgttctgcagattgcttgatcgtgatctcgtggaggcagaggaagtctcagtggatgatgaagaggagaatggattcttaaaggctttcaaggttttcttgcctcttactattcttcctcttctattagttttctctgaatcagtgtttactgatttcaatgctccattggagtctatgcttaattgtattcttatattccatgatattcagactgtggttggctatcgaaatcccttctgctgtgcacaatcttgtcaaatcattacgtgctaagtttgtaggatcaatacactttatgccagttcgctttgatgcttatagacagtctttagaaagtgtctattgattgttcgttccggctcaatgtgaaagccaacttaatgaaaattagtgatgatgacttaagttagaaatttatgcttgtggtgatgttgattgagccaatttattgatttggttatatttcttttgaaccctgatcatattgaatgcgttatatgagtggtctttagacttagctggaacataaggctgtgtcctgcattgctgcttgtcacctcttaatattcgaactccctaaaacattgtttgtctttgtgtgcatatagaactgttctgaagcaaatagggtgtctggtactgtttagtgtcattaactctgaaaatgatttcccttgtaagattctgtgatcttcctgtattgtaggtggctaattttgaatatatagatgaaaatgaggcagcagcattagaggcacagagagtcgctgctgaaagcaaatcttcagcaggcaattctgatagagcaagttattgggaagagttgttaaaagataaatttgagctgcaccaggctgaggagcttaatgctcttggaaaaaggaagagaagtcgcaagcaggtttggtctcttcttgatcccccttatccaattgtggcatcatattgataactggatttttcaccatttatgttctttctgattctgtcctgtttcatatatttattcatgttgtctaacttttccttttgaattccttaggtagctaaattcagaaagtaataatttagttgactgtatccttctaaattgagaaagtataatttagttgactgtatccagtataaaactaaacgcccttgtcctcctatcaactggtttgacagatcttatgggtttacatgttggatcaagtaattggggttggtagaggctcaattaactatagtcttctgttttcctctgcaagaaatacgttttgtttcactctctaacttgatatagctcaattactgacaatatacattggtttggtctgccatcatcgtttcatgtctttcaataaaggctgttctaattcttctatgggatttttttcatagttggtatccattgaagaagatgatcttgctggtttggaagatgtgagctctgatggagatgaaagttatgaagctgagtcaacagatggtgaagcagcaggacaaggagttcagacgggtcgacggccgtacagaagaaagggtcgcggtattaccacgtttcggatttaatttaatttgtaatggagctgaaaatgactgatattagaagtgtgcgcagtttattagatgagttttttttctatagataatttggaaccaactccgttgatggaaggtgaggggagatctttcagagtactgggtttcaaccagagtcaaagggccatttttgtacagactttgatgaggtatctactttccattaaggcctttagacgccagaagctattctgtctaaattttacagtttcatcccccgatgcatctaaattatcatcagtcttgtggtgctcaatatttacaagtttttccggttggacaaaataattgcaggtatggagctggcaattttgattggaaggagtttgttcctcgcttaaagcagaagacctttgaagaaataaatgagtacgggctcaaccctttaatgctcttctcttctgcttctttacaaaaaacgcatcattataaaaaggctttctggtttattctttaactaattttttaatgactgtttctcagatatggaatactcttcttgaagcacattgctgaagaaatagacgagaattctccaaccttttcaggtgatcgataattgatattttcactgtttgctgcttttccctaaatgagatcattgcttctcctgttaaccggttaaatgtattaatataatggtcgttgtctatagatggtgtgcccaaggaaggacttagaatagaagatgttctagtcagaattgctcttctgatactagttcaggagaaggtgagtctattgactttaattcttcattaagttctctcttttatatctgagtttttttttggtatatgttacttctagtctatagtttagctctgtacataagtttttaatacagtaatgtatgttcaaacctcactaagatttggatcccgggttacttatgtttttttggtgctctggcccgacaggtgaaatttgtagaagatcatccagggaaacctgttttcccctctcgcattcttgaaagattccccggactgagaagtggaaaaatttggaaggaggaacatgacaagataatgatacgtgctgttttaaagtatgaaccctgcaccactgttcttaccgaatggttttattttctcatcattctccattacttgctcacattttcttttccttctctggaaatttgaatctttaggcatgggtacggacggtggcaagctattgttgatgacaaagagttggggatccaagagcttatctgcaaagaattgaatttccctcacataagtttgtctgctgctgaacaagctggtttgcaggggcagaatggtagtgggggctctaatccgggagcacagactaaccagaatcctggaagcgttattactgggaacaataatgcttctgctgatggggctcaagtaaactcgatgttctattatcgggacatgcagagacgacttgttgagtttgtgaaaaagcgagttctgcttttggagaaggcgatgaattatgaatacgcagaggaatattatgtatgttgtaccatctgcagtgttggtacttactcacatgttttgcgctgaattgtttaactttgattgaatctctggttgcagggacttggtggctcatcatctatccctactgaagaaccagaagctgaaccaaagatcgctgacacagtgggagtgagctttattgaggttgatgatgaaatgcttgatggacttcctaagactgatcctatcagtaagttccatcacaagtttctttatttaacgagttgttgattctaatgtgagctctctgaatctcgctgcagcttcagaagaaattatgggggctgctgttgacaacaaccaagcgcgggtcgaaatagctcaacattataaccaggtaagctatgcttttttcctttggtggtaggctaatgtctagaactagtatatcacactaatatctctccggttattcagatgtgcaaacttcttgatgagaacgctcgggaatcagtccaagcatatgtaaacaaccaaccaccgagtaccaaggtgaatgagagcttccgtgcactcaaatctatcaatggtaacattaacacaatcctttcgattacatctgatcaatccaagtcacatgaagacgacaccaagccagacctaaacaatgttgagatgaaggacacggccgaagaaacaaaaccgttaagaggtggcgtcgtcgatctgaatgtggtggagggagaggagaacattgctgaagctagtggaagtgttgatgtaaaaatggaagaagccaaagaagaagagaagccaaagaacatggtcgttgattgactcaactggtaaatcaagattcaagagccaaggggtcatgaagtaggaactgttgtattatctttggttacatgtatgagacttattcttccttttgtaagacctatcttctgcttatgcaaacattggtaacattttaggctaactttgatattcttcatgttttcctatttttggaaaatcatgaaattatagtttctcaatcaaagctgtttggttatgcacctcaagctttttaacagtgtgtgaataggttcgatgaagtccggttatgtttccggttagacgtcgtctgtttcaatctaactactattctcaatcaaactcaaaaactgaactaaataatgtaagatacaaacacaagaatgttataatacaaatttgggttgactttaacataatggtttcgagtgtacgaaggaatctttgttgctttaaaattcgtcatcatcactttttcttcatagactttttctatagggttgtttcttcataggcccgtgaattttggtttcatacacaaaagggacaactatacattaaaataaaaaagtaagaaagtttatttatgaatccttttttctttgttgttttctttaatggagtcctaaattgctagaaccagtgggaaaacaaatagtttacaattttaatacacaaaagattagcgagaaaaagagacaaacaagatgatgatatttgatttatgtctaaatgtttgttctctcatatgcatgttctgagtgaactaaaccctccatatcccaaatctcctccagacaaatctccctggctctgttcctgtcacattcacaaaatcttcatgtcagaaatcacaataatctccaaatcagaatggttaatattggcaaaagctttaatgtcacacctgcttcatcgtggagttgactatatcatctaaggaaccagcatctgcaaccatgaatccaccactctgtaacttctgttggcctacgacgaacccttctttcgggttactactactcaacagagccatagcatccgtggatggaccataaaagactccaggttgcacatttgtgtttgaatcgaagtccgtgtttctacagaaagctcggggatttgttgtatccaaggctggagaactcaatgtattggcagagtcacagaatggtatagagtagcttgatgacacattgttccattccaaggggtcgggtctagaatgcggtaatggagagacatcgaactgatgattgatactattactgttatgtgccgggggaggagggtgagtcgaagaggatacagcatttgaccaatgctccaaacgtttattgatctggtgtcctgggaagcctggaggagttgcttgtgggtgaccttctagaaccacgacattgttattaggagcactgatgagcgagttttgttgcgtagagaagctaggaaaagccatggaggtcccagcaatgctcttgttactgttcatgtttctacttttgttgttgtttgtctgaagctggtcgaactctaaaggcattggcaacccttgaagtatgtttcctccatcactgtggttaagaggaagtgatgagacatggtgaaactttccgatatcggtctggttttgcaagaacattcctgcaggaggagaagaaaggctgcggacaccgatccccgaagagctattgagtctgccaagaatcccgtttggagggaaagatctcattgcaggagccccaccatggtactgaccagatccaacagggattgggcggtgatggaaaccatcaagtccattcatttgcataaaatgtaactcagagtttgccataatagcttgctgattagccacaccactgatcctcttcaagtaaaggcggaatttctgcaaaccacagcgaacaaagtcataagcttccgaggtgttaaaaaacaaatcttcgggttacgcaagttaaaaacatgaaagattctttgtaacctgaagatgactggccacattttctctagtgagcttctcaacattcatcagatccaaaatctttttaggcatagcctctgcaatcaaaacaacacacacaaaacagaacttaagtgacatactgataagcttactctcatatcaagtgacatattgataagcttactctcatatcccaattggttaacagctgcaacaaatttcttatgcagctcaacagtccaaacaacacgttgcttcttttgagcacacgaatcatcattatcatctctatcctcatcctcatcttcattatactgatctttacgttttctattacctttcccattgttcggatcagaattcccaacaccttcattacctgatccatctctcttatcaccattattattactcccacggttcttatcaaatctacttctcacgacatgttgccatatgttcttcaactcctcaatacgaaccggcttcagtagataatcacaagcaccatgagtaactcccttcatcacatactttggatcactatgcgcagacaacactgcaacaacaagaaaatcatcatcacaaaaccaagtctagagatcaaaactttattcctgtagtgagtcattaaggaaataaatgacaaaagtttaattagaaaataataataataataagacttacttatgacaggtaggtccatttcaagaccaacaagctcaaggagtttgaaaccatccatgtcaggcatgtcaacatcactaataaccagatcaaacttgttcttgttctctctcaataactctaaagccttttgtgcttggttcgtcgttgttactgcaacagattccataaagtcttaaacttttaattcaattcaacaatgaaactttctctctgacaaatgtcaaatcttacaaaatctaacaatggaataaaaaaagctaagttttttttagatttgtgtatacaagaagttaggtagatagatatcaaaagattccaccatatgtggatcaaatcacagatcaaagagacataaaatctaaaaacttgatgaaaaacagatccaagaaaacagagagagagagagagagagagagagagagagaggaaccatggtattggcagtgacgaaggagagattcaaggattttgagacaagtttggtcatcatcaacagcaagaactctcattcctacaggaaactgatccaaagcttctaaattttgttcaacagtcatcgtttttcaacagacccagaaacgaaagattggatttttaatcttttttgcaagttgaagaaagagagaaagtgggatgtgcaagaacgtcgatggagaaatgagttaaagattaaatatgtgaatggggtctagagagagagagtagtagtatataatatttagatttagagagagagacaaaaagatttttccagcagagttaaaaaaaggaatcttctttagctcttctagctatctataaatggctatggaaattgtgtgtgatcatcttcttaacactatccactctttttctgcaattcttttttttttctttacattacaaaacaaataacattttattgagagacttagaaagaatctttgaaacataaccaatttggtttagtttggtttgttttgttttgtatggtttcttttaaaccaaacggaataataaactcaattatacgaaaattcgtaatttttaaacgaaactgaaccgaaatgactaatatttgtctagtggtttttgttaaagtggtgttttaatgtcattataccgaatcaaaatccgcatattgtaccgagtttaaaccgttacaaattgaagtgagttgtttgattttggtgagtagtccctacacttatatataaggatttccaccctaaaagaaacttgtatccctatcctcaggtgatatataatacaccattttttttaggtttatcaaaaattatcatttgtaggaccaaccatatattgtacactggtttagtgactgaaccggattagtattattgccacttcctctctctagtctaaagactttaaagtttaaactaataaaacacactacttgtttgcaattaaattgtgttaaaaagtaaaaaccaggtaaaataatacttaggtgttatttgaatgggggaaattaaaaagtaattatgttagagataggaaagtgtttaagtaaaaagattttggtttatactatcatttatatcgcatcattattgtggagatacattttgattcttgttaatctagtattgtccaactgttaaacggacaaaaaaaattaaattatttccataatgtcaatcactgttaaatactttccttagcatttgtttcagatttaaaccgatttactaaaacgatttttgtaaaattttgggttttaaatatattgtagtcacagaaaaaaaaatcaaaacacctaattcgattatttctatcattaatttaaatttcatttcttattttttaacagtgtttatattaatttgtttggttggatataagatgataaatggttttattccaggattttgtattaatttacgaaccccaagtagtagtgttaaaacggtctttcttgttggagaagacccttcattttttttagcacttgtttaccttcgtgactaatttttatgtaagtgtgtttcttgagaaaagtgttttaacttcactttataacatatgtatcagagaatctcgtagcattacatgtaacttaacttcggcaagtcttggtgttaaacttattattatcttatatatagattaagccattctagctggtttctaaggagatttgtcccaaactcgaaaacggactaaacaattttgatagataagaccacatctatctgatatccagtattgctttgatcgcgtaatcgaggtctagatgaggtagtaagtagtaaccctctttctcctataagtttttaaggtacttcacgaggtctaagatatgtccattcatgtagataatacatatctgtttactgtttttcccttttctcctttcatgcactgatgtacaagcaaatgataaaattgacttagcaaatcaattgtagaaaccataaagtagcctatgttttttgtacatactcttaaaatcgactatatcattattcttagaaaaacgctatcgaaatatatgataacgttaagaaaaacgctctaaaatatatggtacaaaagatagtaaactgacaattgcactcggactccactgatatccaaatcgtaacggtatctggtattcaaattttagcatccttttgatctttttccaaaaatataaacactatgtctcttaattacatcttgactttatttttcactataatttggcatagaaatgatagactgtcgtggatcatttttccagctcggcgtataagaaaacaatttttttctcataatcgtcttagctttcggcatggttgaaattattgaattgatcgatattagagatatcgtcccacgttgaaagtttagtaggaacttaagcagttatatataagatataagtctctttactcattcccgattgattttgagttggaagcccataatctaatatggtatcagtgtccgatctgcatatagtcaacccaatccacatcggtccactaatctatgcccaaacatatcaagactaatggatagaaaagccatcatttagaaggatcgtattagagatattgtcacatattagaagttagtataatcttaagtaatatttataagatataacgttcttcactcattaccaattagttttgagttggaagcttatattttgatagaagaatcctttgaatttactatttttgtgttctaatacttccgtgtcaactgttgttgcgtaggaaaacttgcctctcaatggataaagtaagctcaaaagttttgttatcgccttaaatttgaattttataaaatcacacctttggaaattaatattacaagaccatactttaattacaagtaatcagattgattggagtatggtttcaaaaactactatgaatattcgaaaagtgtatcttgtgaaacagttttaaatagctttctaaaaaaaaaactgttttaaattagttgacaaaacaatattttggattttaaaaatgagacaggctttagagagagcaagcatgcttgagattgggaagtgcgttacacgcttgagcgtgcatcaaaactctttctttcgtacagttgcagattaaaatcggttcttaaaattatttaatatatgtgataattaaattaaaattcgtatggtaaaattaaaatcaacgacgatattcgtttctttgaccttttttttcttttgccatcgatttcttttcacttaaaagtttttctaaaagaaagaaaaaaaaaaaagaaatcttgaactttaagttttctcttgcaaatcaaagttaagaaaactccacatgtgcaagtgcaagaacagaaaatggagaatttcgaacaacgttctcttgcaacaggtgtttcaatatgcggttaagtatagtttttcaaggcaaagtattgtttttcaaaatcacaatatctgttaatagtgacattttaaaaaattcccgaatgattcgcaaaaggtgtaatcaatacaccataatctcgcttgtggcatgttgctagatagcttatacagatctatcctcaaatctttttgctttgctatctttcttatcaatgttgtaaaccttagctcaaaaacttatcttctttcccctttggaggttgaataaatgaaaaaaaaatatgttttgcacacaaaaaaaaacgtcctaactattatcaatcatgacaatatactttatatatgtatgaatgtatatatccatgtatgtatgtatgtgacatgtatgaatgtaagcatgttattatttttcttttaaacatgtctgctattatattcctggattagttagattggacctaattagattgtacatgtataaaactgtttggtgctaatcatagagttcgataaagttaattagactaaaataaatgtatataacatcttgtttatcaatcatatagtccacaaacataagcttaatttaattactgtaataattatatactatttaatgatacattaaaataaacggatgtagaaactttgagaaaaatcaagtgtttttatctcaactggtaaaaattctaagcaaaatttagaagtcgccggttcaaactaagtttaggatgaaactaataaagaaaagaaaggaaaaaacgtttgagaaactatatatataaatatatatatatatatatatatatatattaaaacaaaagtttattagaaattgcaaacgatgatagccaagccaccgtttgtttcttagaaggccatagaaaaaatgagatcagacaaccaaaattgaaaaaaaataaaacagtaattaaaagttatatggttatcttaatttgtttacaaaatatggttattcagttaaatcaccctatactatattgtccctctacaaaaattaggtattttcttaaatcttgactttgggggagttggatattttcgacgaagaatatcaaaaatctaaaaagacatgttttggatatgtaaaacaaaatttagaaaagtatcttatatataaggtatgttatctccaaaaaaatgtaatagtagatttgcatttctagtcaatatgttgatattaaacaccaataaaatagtcaatgcactaattaagttgccattttcatgcatcaaaacacactatttaaatattgccatccaccataagattttaaaataaagaaaacattcaaaacatcacgttcttagaacttaaaactaaattgacaaacacaaaatttcaagctagggatatgtcggcatcaaaagcaacaatgctcattttgttcgctctctttctttccggtaagtcttgattcctctcatcttcttttatataaatgaaactgattagaaacatagcttgattccagtcaaattttattttaaaaatgaacagacatattgttggtgagcattcctagagctgaagctcagttgatagttccatgcaagacatcagaacaatgtaaatcgattcgatgttctaatggaagcgcacaatgtgtgaacaaacaatgccaatgtccaagcctcaaacagatttactcggtgacggatgtgtcgtgcaagacggtctctgattgtgttgcttctcatcaatgcccgactggtttatctgcttgtattgaaggaaaatgtatttgtttgccttagtatgttcaaattatattatttaatatatacctacaagttaatttttaaaaagtttagttttatagatattaatttgaattcgtttactatggggaactctatcgacataaaaaagaaatctaatcgtagtcaacaaggccagagtatatgttggtaacgtactctatttactttctaatattacacaatcgactactacgtgatataaaagagacatctctacaatgataatgtgaaatattcattgttgatactttacgaaaaaaccatagtttcgacatttatattaattatgtatatattcatcaaagttatgttaaccaacataaatttcagttacaatcaaattttttgttgtaatatctaaggctgggtaaaatacccggacccgaagatccgaactagctcaaaatatctagatgaaaaatactaggctttttcttttgaaaaactaaatcagcgaatgagattaaccaatgctaccgacggctaacttatcgataacatttttcttctcttatctcgatgaaagatgatctctcgaaaccaaatacacaagacttcataatctagtccgtatacgccaaaaaatgaacctcataaaacacttcttgatgcggcgaaaacaattgatgcataatggagcgcctataaaatccttataaaagaatctaatctcaatcagtttcggaaatttggagacaagaagcgaaagctaaccatcttgataaacatcaggaacaagaatgacacttgatcgaccaggttagcatccacaaatggggctttgttagcttaggtaagacaacaaagagtgagtgcgaagacaaaggttggatgaaggctaacgagaaaccactttcaagctaagcctgtggcatcgaaactatagggagcacctaagcgataactagatttgggttgggagaaggcaaatatcaatggctttattattgactaagcacactgtcgatctagcaaatccggcaaatcctcattgcatgagccacaaaacgaatagatatgaaacgcttgaccgctttcgcatagaacacaacttcacaacccaaaataacaagagaaaatctccagacgaatacaaaaaaaacaaaaaaaactctgcatctcctatgatttaaaaccaagaaactaaagcagataagaaaaggagaagccactcacgacattgacgagaatcgctgatcacagcaccagagtgacttcccagccacaaaactggaaatgagctaggattctactgttgtttgagtgaaagagcacacactttggttaaaatgacattagatcatcgttctaaccacctgccattgctcttttaattatataattaaatttgatttttataaaactacaaaatctcttgtaattttcaaatttattacctttttaatccaaagcgatccaaaaataaatgtaaattgaagaatagcaccaaaaattgataaaattataataatttcgtaatttaaccaaattatcaccataatcactttggtaatttctaaaaattactttaacttcgataacataattactaacatacaaattaaaatcaaattttgtaaagagtatcaatcttccattacaactttagacttcaaccattaccatacaaccaaatgaaactgaactatttgtatataaaaattattctattttggttccaatataaataaaatatctagtttacattttttctgtgtttcttctaattatatagatttagttctataaaaatacaaaacctctaagtaattttcaaatttattatatttttacccaaaacaaccctaaaataaatgcaaattgaagcgtggcactgaaaataaaataaaaatatcttaccatatttaaaacaaataaccagattcagtgaattaacagaaacggatggtcaagtcgacaagacaaacaagtgctaaaagaacacaacataactcttttgcttaagcctcaaaaaattgtcattaacccaatttcccagaaacttcaaaaacagttgggggaagaagaagaagatgaaacgacgaagaacccttttataaagtctcaatcttctaatccaagatctgccctttttcagattctatctcaaagctttcctcgatcttgtgatgtattgaagccggagactgagagagatgttgtgcttcaaaggctcggttaagcggaagaagcaatccggttctgttccggtttatctgaatgtctacgatctaactcctatgaatgcttatggttattggcttggacttggtgtttttcattctggtgttgaaggtgaatttgatgattctctcttttttgattcttaattttgttttctgggttttggttatttgtttgtttggttgctaaaggaagtggcttttgggttttttgaaacttgatttgttgagaattattgggttaatagagaattgacttgagaattgaccagagaataccaaaatctcaaattttgattttgatgatgaaagaatatgattatattgttcatgggttctttgttctgtttagcaaaatccaatttttattgagccttatgaattgtgatactgagttttatgtttatctgtttagaatgcctttgtgtaatgtgttaatagagaaactgattttagatggtatattgcttaggtgatcaatagagtaaccatagattgtgatggacttgatggttgttggtacttatctaatgttttgtagttcatggagttgaatatgcatttggagcacatgaatcatcaagcacaggtatttttgaagtggaaccaaagaagtgtcctggtttcacgtttaggaaatcgattcttgtggggaaaaccgacttggttgcgaaagaagttcgtgtttttatggagaaattagctgaagagtatcaaggaaacaagtaccatctcatcacaaggaactgcaaccatttttgcaatgaagtttgtcttaaacttgctcagaaatcaatccctagatgggtgaatcgacttgctcgcttaggtaaaccaatcacaagtgactattgttatgtttttgtttggcataagagagatcacatcaagtaatgcaggtaactgtttttgtataggggttctctgcaactgtgtgttaccacctcgtttgaacgaggcaaaagtgagacgagtaggaaaaggagagctttcggaaagtgagaagaagaaactaagaaaccgatcacgatcagatcctttactgtcttcttctccgtcttcatcgacacctgataatcatcgttcacacattcgagcaaaatcaagtggtaatcatccttcttcttcttcttcttcgtcttcgggttctaagaaaaatcgaagacctaaagctcaagaccagaagtcgccaagcgtaagcatcaagacttgattgttatcatcattatttgaacatttaattattgtttatgaaaaggacaaaaagtaaaaagacaagaacagaggaacatgccaagcaaagtatcaatcatatatggggcatgctcgtgctttgttctaaggttattgaaaacctttttgggtgtgtagatcatttttctttgtacaattgcttataggagagagagaggtcatgagtatgtacaaaaagaatatgattcatatatttttctatgttttatctctcatttaaacttcttcatttcaaagttttaaacacattgaccctctgtgtggtcatatttttttgtatcccaatgattcactaaaaagataatgaaatgttatagttgcatgattatataattcctttgatgtatattttatgtagctggtgcttctttggtaatcaaggacgatgtgtatatgagaacaaacaaatataatttgcatcatttaagtctcgctgctcccggcgtacagctccttcttgtgctccacatgattgctttgtactcaaacatccatgtgttcacaatttttaattccttcgccgttgcaaagactcgaatttgggacctctcccatattcagtcgcaaggttaaccaacggagctatcatctactttttcaaaccggtaaaggaatatcatctatttttttgttatgataacgtatgcaccaagtcaaattctaagtaagttactacacaattgtgtaaattgtgagtcatactcttgttgcatacgcgttttttccttcgtcttttgttttttcctctgtataatacttgtatcaagcatctactaaatcatcttataattatctcattggttgtttaagcacaatcatatagggcttattttgcacccttgttctaattctggtggcttttgccttttttctaaactgattaaatctccaatgaggcattgtttgttaagaaattttcacaaaacacacttttttaccctttgcttgttcttactactctactggttcctttgcaacgacgagtttctggtctgttttgaacaaaacaaaaccaaaactctgattcttacacactttcatatatcctcaaagccaattggttgctttatatacaaataaaattttttgataaagataagttgagtgtgtttttacttcctccaagcatagataatcaaagagaaccaactcttagacccgaagctcctctcatcttcttccctacaactagaccactccatcacagaagacatcctagaagaagaccaatgactatacgtactcgcccaaaacgacggtgttcgacaattctccttccgtaaaatgacatcgtctcttacacgcttgttcatcatcaaaacgtcgtttccttcaacctcttggttctcaaaccggagtaagaacacggcgggaatcttatccggtttaaccttatccttgccaccaaacagccagttgaaaacatcccatgatatctgtattgtcacaccatcgatcacgatctttgtgtttcctctgaatttccattgaagctgactaatctttaggacactcttatcgtctacgctaaaccggagactagcatcgtcgttaacaaccttaacgtcgatactaatctctctaagttttccttgaatcatgattttcgtagagtaaactctgtttccaaacagattctctttcttggacaccaagatttgtctcctcggtctctgtttcaagtttcctccaccgacaagaagacctacttcgccggatacaaagactgccacgtaaaacccggattccggatcgggtcctgatccaaattttgcgtgagtcaggtcccataccacccgaatatccggctttcgagataacttctttgatccattttttctccagaatgtcaagggtttgatttcgagccggaaggcgaagggaatggagtgacggtaacaatctagagagtgtagatagcaatttgtggagttgcatgagtagaaatgaaggtggagagagcgtcggaggaaggatcgagaccatgaaagaaagaaaacaccaacgttagtgtggtactgacaagttgtggtagcgtcgccggagtgcgagatatacgatggatttgatggggatggaagagccgacggtagatcgtcgttgatggcggtggcggaaggatggaaacaggcggacaaaggggaggagccaccgcgaccaagagcagagattttcatttttaggtatagtcaattaatatgactggttgatcttatatacgcacatgcatacaaaaagacactaattatatgtaaggatatgactatttgagtatttatctatacttgagttggcttatgtgtctgaaaatgagttgtcatgttgtgaaaattcaaaagagtgggtcaatgtcgagaaattgaaagcaactttgtggataaattttatagaccgaaactgacgttcattgatattttgtgctggttttcacattatttatatgtagattatgttctagttcaattcttttgaagtcgcttgactttttgtctctttcctagtttccttaatcttttccacttatattagtttttaacgtttgtagtcacagtgaaagctaccaaaattctaaaaatggtaaagagaaatagaactgtatcttgttaaagctcggttttcatgttacttaacattacatatgttgtgtttgatagtataaaataataaatttgttatggataattagatgaaaaaattaaagagttttgcgataagtaagatatttgtttcttgttggtttaagagtcggtttgggtccatgatataacactaattaaccaatagttgtggccttgtgggaggtaaatgatccaacaaactttgctttactaactcacatcttttttcttttgaataactaagaggttttggcctaggccaatacatcctctcgggatgggactaaagcattttatagaattttctttcaaatgttattggaaccagcaacctctaggcttagctaaaatattttaccagttttgagctattgacacttgataactcacagtttttagatgtagtttctctaaatcatgcatataaaataaacatcatagagatcactagtagatgatttcatcaactagttctatattcgatacgattttacacgaaactcgtattttcgaaatgttgtacattgtatgatataaactttagaaagggaagatacaaaattaagttgctgactatatgctaaacctatagacacgtgaacaatgagatgacggcaaacatgtggatttaagtttgcttcggtttgtttcagtttgttctagtttgctacaacaaaactccaaaatattgttgatttggtggctacaaaaaaattataatataaaaatagaagatatgtgtttgattaaatatactaacatagttttgatcgtattaggtagagccatatttagataagtttgtggactgcgatgaagttatgaagccacacaatatgtatttttttttccctcatgcttgattcgttattttctctgtgatttgatatgtatgcaaatttatttattaatggttcctttttggattccagctaacaaaagaaaaggtttgaaaatgtccaactacaaatttaatatggaaacgtacaccaattcattgcgagattggtgcattactcgcttgctttttgtttcataccagacaattcaaaacatgtgattgatttctcaactttcattctctaatcatttagaggatacctaccaaaaattaatatcctccaaaattatttggccattgacattacaaataaagaaatgtctttggatgaaatatttcaaaattatttttattcattaaaacaataatgatttaaatactaagcacacatatagtgtgacaaaaatatgtgatttaaggatctcaggatacaaacatctctaaactagttttacaagcattcgaaaacacagctctaacaaaccaaatcactatgatattctcgaattacttactttctaacaagaaaagattgttggagatttttatttgcgttaaacgattaagttcttaatcgatgtaatcggtgtactagacgacttaaagaataggttagctatgatgttgagtcaatcaaccacatcccctccacaaatccaggagagttaaaattttatcttttaccattcattttttccttctacaggttcgaaatcgaagtccggtccaatcttgaaaacatcaattatccaacatttttgtgctggaccgaagccaatggcaggccagatattataaccgaaggcctgaaagtaagttacaacgagatagtaagaagatgcttaagtaaatgggcctttgtggcccaatctataaaacctaaccctagcatcgtgtccccatataaaactcacctccatcgctttctacaagtttcttctccagatttagggtttctcagtgtttcggctcggccagaacaagatcgcaagacttcaagatggtaaatcctttcacatctccttcattcttaatccttatacttttctattatcaattagtatgtaaatgttacggaagttcgagactttgaatcattttgatgatcttctctgcttcaaccttaatcatctacactgaattttatcttaatgttacgaaagtttaagactttgaatcatttttgatgatatcttctttgtatgaaacagccgtcgcacaagtcgttcatgattaagaagaaattggggaagaaaatgaggcaaaacaggcctattcctcactggattcgtcttcgtaccgacaacaccatcaggttcgtaaatggaactgtagattctcgtagtttgaatgattaggtttagaattagtaaatcttaagtgtgtttgttttggttttacaggtacaatgctaagcgtaggcattggcgcagaaccaagcttggattctaagaggtttacttttgcttattgtgagagctttgttcttttgaaaaagactttgttttctttatcagttttgattgttcacatttgtgtaagacgatctttaatcatttatgtttccaaagtttcctgtagtaacattgagtttttcattagtttaaagatttggaaatgacttttggttaacttgtttaattggttcattgctcttcattcagtagaaccaagtgtttgttttgtttgggtgaaatctacttgaataccttcccattttggtttgtaattggtatgatgtgtagttagggtagctcgaggtttatagaagtgttgatgaagtggtgaatgtttagcttgtaattacattgtgtagcccaacctcatcagttttgctaattaggtaatgggtttagttatcttgaggtttaagaagttattaagtatgaacctagcaacatcaaaaaagattcattttcgtacaatcagattattctataaaagttttcttattctgttgatgtattttatatcaatgaaagtgtaagagtttggcaacacaatttctattgattaaggtagacttatgcaatttgcttttttgagttcggcaaaaatctattagctatctaaatatatttatatagttttgtattctttgaaatttatccaataattttttaaaaacaattatgtgtctaaaattatactcaaattcgaccttttcccttgtgagcagcagtttgtttaaggtaaacatctcaattgataaatggattttgttgaaaaaacatacaaaacgtaatggtcaacacaaaaagcaatgatgtattagagaggtaatttttttaggtgtcacctatatttgttaattgaagtgtggccatttgtttttttttgtcggctgtgttttttgcttccatttcgattatgttccaaccgtcgttattgactgttggctctgcgattttgatgcttaaatcttacaagttacaacattctcttaagactgattaaaaaaagagatgacatatcctagtttcttgtaatgtttggttgcttacataataatagttgaaaatatgatcaacccacccaaaaaccataacaacgttgaataaacgcatcttgaaatctacacgcgaaagttgaacattttaatgaatgttataacaaagaacaagtcaattttctaaaagttatcattagaagttgacaaaaataccaatttagcattcaaatcaacccactctctattcctctatatatgttacacacatatagagagttccatcaacgttttcttctttcattttcatattttcacttcttactcaaaatattcttttgttatctagcctttgtgttatagttcaacatataaccactaaacctttttcaactaaagaatgtggagattcattttggtgatgtgtcttctagctctggtcgaaaggggaacctcggggaaattgccgatatgggaaaaggagttaggaagattgcagggtttacataaccagcttcagcgaggtccggttcctccatcagaaccgtcactatgccacaatagactaaaccatctttctcatccagaggtttactcttcccaaacttacgttctttgcccatgatcatgcttattccgtcgttgacaatgatcaaatctcatttgttattttctttatctctgctcaaacataattcatagttgtatctgtgacattttgatccgactactccaccatcttgagtcatactatacgagatatctaatcaattttgacttttgatccgactactcaaaccttgtctataataacgtcaacattttatatactagagttcttaaaagatcgtttaaactttatcattccgaaaaaggagttcaatagagacgcagtttacgtgtgggatcaaacaatattttggtttcgcacgattaacatgcgacacagttagagcatggagacgaaaacacttgaaagaaagtattataagcgaacaaaatgatagaactcacaacgaaaacaaaaagtcacatcacagccaaactagctagactattttacaaagttgagatcctctacatggtctacaaagaccgtttctacaattctcaaatgcatcatggttagcttcaaaaccttggatctaacaattatatatggttatatatatgagacaagttaattgaatactatattaaactattttcaggctataatgactcgctttggagtggagcaatgcgtttgaattatgataccatgttgaatttcaagtttttgccttttccatagccgcaaactgtgatgtgggaatatatataagcaatttacaaatacaaaaatataattatatttgacaataaaaagaaacaaatataattatatagaactcaacaaccctgaaaacttatattctcacattcttacccccaaactttcagatgagtggatcataaccctatacaaaaaaatataaaggcaaaggataaaagaaaatcatctaaatggctttggatttcttttggcgtgtttctgtgaatcatcttgttaaccggagagtccctcctagctctaccggaaccagtggaacaagtgagtgaagaacatcggttatcaacggccggtaacttggttctggctgcacgcacaacacagccatggctgctacctaccaaaagaattaacagtcttgattcaacaatgtacaaagtatttgcaatctaatcaagcctaatgaagcatcaattaagtttagtgacaaacaagatggacttaagccggttctatctcgaaaccaaacctggtataagtgtttgagatccattgtatcttttataacggcatccacaatgtttggaagcttggatctatcggtaagttgtgcattgcctacaccatcaacacatctatatatcactaaccgtttcattttgtacgtagaaagttgttaaaacgtacccaagttacaagagattggcattgagctggagttaatttttcaactggtcgtctacccaacaagagttcaagcagaactaccccaaatgcataaacatcactcttatccgtcagttttcctacatacatatccaaaaataaacagttatattcatcgcaaaacgattatttaagtggaaatgtaatcgtataatgaatccatgagagagtgagacaagtactcaatatatcaaaataatatcacatgatatatgactattatgtgctacacgacctaagatatgagaacgagtcaagagtgaacataagtaccgtcaaggaggtattccggggcaacataaccaagtgtcccagagagtttaatgttgttcttgccatgttcatccagcgatacagcaagaccgaaatctgaaatctgcattgttgtaatcaaacagtaaccaaacaatgcgattattcggtactcaaaagcaaatataggcaatgataatgattgtgaaattctcattttacattgaaacaagaactaagatctaaatcatctaatcaacaacattttgagggaaaaaaagacgcggtatgaaccttggcgttgaaggaagaatcaagaagaatattcgaagatttcaaatctctgtggataactggtggacgacaatgctcatggagatactctagtcctctggagtcaaacagagcaaaacggttgacagaatcaaaaccgatattaaccgatgagaaaaccggtctaggagttgaaaaagtgtcggctatttctttaaatacctagctgtatcaagagcaatcttcatacgcatgtgccatgttagagctgatccacgagaaggccctaacacattaattataaagataacacaatcaattataattatttaattcatgtcctaactatcatttataatttaagaatacttcatatgcaagatacttcattgggttaaacaagagcaaataagaacatgtttttaccatgtaactgttcatctaatgatcctttctccataagctcataaacgatgaaactcgagttgatttcgcttgcagagcccaacaatgatataacgttcgagtgatggatcttgctcaacaagtcaacttcattctgagatctccaagaatcaatatagattcaagaatctgaacatgaaaaacagaacttggtttatgttatttatacctgaaattctcgttttgcttcttggctaacgttctcgatcttcttgaccgctgctttaacgttattgtccaaacaacccttgtaaacgcatccgaaaccgccttgtccgattacactactttctttaaaaccgcctgtcgctttctcgagggtcttgatatcgaaaaattgcacgtaacccttttggatagaagttcttctctgagttttaatcgagccaagtcgtctcattaacaaggaaaatgaattc

SEQ ID NO: 280 - DNA, 86017 bp, Arabidopsis thaliana
aagcttaactcgtcgtcttcgtttaatccgctaatggacagtctagtgtagtgtagtgaaagcgaccaaagtcagagagataagttcacctacttatcataccctcggacggggtattattataaacttcaattaacgaggactggtttaaacgcaaaggatgcgggaatttgctgaaacaaaacaaacacagatacagtttcaaccgttattaaataagttaggagccgattggtaattattgataattctgcctctaaacaatataaacttttgttatatgaatttggtataagggctttgactatattataaatgatgattagtaaaaattgtgatggtagaaattacgattttaaataactaacaaatatggacgaagaatattatatatatgacatctataaattattattatatatatttaaaatattatatataaattttcttagtgaaatagaattttaatattgttttttttacataaatttgtattaatttttggaagagttcatttttattatttttattacatcgataaaaaattttaaactaaataattatttatctacttgtaattggttttagaaatatattaattacaaagaaaaaactactttccatatagaattgttttaaaaattacaaaattaaaataatctctttataaattaattattaatttatcgataaatattatatagaattaatcacttatttcctcatagcccatgaaatttcccaattttgtggtttcatagaatctgccgaggaaaatctacgaattctcatttgcatttttacttttctaataaacttggcgtttgggcttagttttgagttttgacacagtttgtaatgcatttatggagagatccaaattccaaattacatacaaacgctacaagactattcaaagcaatcaatcgcgcaaaggagatggattactccgacaaaccgggcaggaactatgcaacttgagccacgcatcaatacattcagtatggaagcaatgttcacattcaggtaaacacctaacagtttctttggttgcatattccgacaaacaaatgggacaaacaacatcatttgacccggtcgggagtctcctactctcccctagctcaactttcttgtatgactcaattgtagactcatcgagacctatccttgcgacttcgttgcttggctgcgacgttacggatccagaaaggcgtgcaaccactgcttgttgtatctgtgaagagactctctcggaactgcacatgacaagaccgacacaaaaagtcaaggcggtgagtggtccgactagggagaggcacattatctttagtacttgtaagcctgtgttgtgaagtcctgttttcaaaacaacaaaacgggtcaacggtgaaacttgtatgtacaagtattcatatattctaatgttacgacattctctcatgtttgctatttgaaaatatattgatttactaatcaagtcaatggtttaatgtcattatttaaagccaactagattcatttctttgtttaattaacaactccttggatttgaagctttcaaccatttatggattctttgggaaagaactttttcaaaagtagatgatgtcgtttcaagttggaatatcgtgaagtacaaaagaacagagaagaattgagattgtacgcaccagggttaacagaactgaagcattcgacttgatgggaagtattgtttttgaatccacatcttgaattagttctcctctcacaatctctacaatccggcgagtcccatttgagccacatgtctcgactgttttggccatcagggtatgtcgtgtaggcgacaaaccaagaaaatggaagaggtaatatcttaaagatgtgacaagaagatggcatcgaaccgagattctcaaactgcacaacaaagaaggaggaagtggtattaccaaggcaatcgatagctctgaaggatgcagtgatgttcgcttccttaggacagatcaagaacgtgtagttacgagagcgaagaaaagaaaaaggagatcctgaagggtcaaagttaagaagtcgtctggccaaacaattctcagggtcgttgaggcgaatacgctgtgtttcatagtcgatctccttaacaagaaagggttcagacttaggaagctttaaggtagtattggcatcatctttgcatatgaggttgaatcctgagtagccgcatgactcaggttgataggagaatagggagaaagggaaacgagcaacgacgctctcttgactacatgagaaactgtagcaaggtttttgttcggatgcgtttagaaggggaaagaagaagaggaagatgagattgaggaggagaggaagtagttttgaggtcataatgtggtttggcacaaagatatattaaaaagttagaaatgagtactttatacactaatggagaaggccctacgtttcctattttttactattattgcattttgaactagtattgcacaaagataaaccattgtcattttccgatttacggctatggtttaggtcaaagtcaatctatatataaacctccaatcgtatattttgactaattaatgagaataagattattaacttatagaaaacccaatgatgttatttcatcaccataatgcattgacgagcatttttataaaatagctgcatgtcttttcttctcattaatctcccatcccgcgacttctatatggaagtgtttatatattggattttttcttttctgttttcagcaaaatgattatattaagaatgaaaacgatcatgctatcaaattacaagatttcggatatctaggaccagagaggaacgaagaaggtggcatattcaaccgtcggaaattggtctttcattctctttgccagcttagaagaaaaaggcaaatatgcttttaaaaatacaaatcacacccagtgggattcgaacccacaatcgcttgattagaagtcaagcgccttatccattaggccatgggtgcttgttgttatctgaacaaactttagtcatatatttcattgatctaaaatatatatgaagttcattttctgttatttgacattaacttcctttcaagatcttatatattgctatatattgcaatcaggatcagaagttactaggctcaaatgttttggagttatgtttggtattggtattgggatttttgaagttcatgtttggtaatgatgttggttcttccttaattgtcataacatatgttttggttcataaatttatttcatgaaaatgaaaatttataaatgtcaaaaaaaaaatctgaaaacaatttatttgtcaatatattttagatcaataatcaaatttaatatggttaaagattaactaaggccatcatgcatcaaccgtttcgcggacttaggtgattatgcttattttagattattttaggtgcaaatgtgttttcactataacatgctgttgttttcagacttttgaaggtgctgattctgatatgtttttatctcataatgctgctggttttggtgtgtgttttcacacttctaggtgttgaatttttctttattgtgagtggataataataagcctagtagagagcctgacattaggagctggtaaaatgatttggcgattgctccaatgttgcaaacctcttcgtcctgtatttgacgctgggatttgcatcaatggtgttttgtattatctcggtaagctcaattgcgatagggaggattttgttatagtttgttttgatgtcaagtccgagaagttgagctttatcggcgaacttggcagattagatatcaaacactagtcgaaactgattaaccagaagggtcaattgggtatatgtcagtgttcaaactcggggaaaattgattgaaccagtaaaagttttgatttgtggattcttgaggatgtcaagaaaaatacatggacgaagcgtatctatgtattgccttttatgtggtggaatatcgttgcgaccaccaagttgcgcattgttggaatgattggtactagtgaaattgtgttgtcgccgtatgatctatctgacccttattatcttttctactacaatctcgagacgaacaatgttagggaagttggaatccaaggacttggagcgtttgagactagtacagtagttcacttatttgtagattacgaagaagatgtgaagttatatgagtgtttgaagatttggcttgagacttcgtagcaggagctagtttggaattaagttccattggagaattatagtccttattatcaactttgcatatgttgggtagtaataataaaacaatttgttggttaaatttaatgtctcagatttgaatccataacaatttttgttgcttatctctatttttttcctatgatggatcttttgtcaatgtattgatagagttatcgataactatgatggatcttttgttgatagggaattaccgtaaaaaaacaggttagattttgtgagatgaaaatggtgtataccttggttcggatcaaacagtaggcacaccaacaaatactgcatttgtatgtgaacttcaagttctcataatcacgaaccaatcagaaattaagaatcaaagaagttaaataagagagcaaaaaacatcactctaaaatttttccatccaaataatctttccagctatcccaacgaacaccatcttcatcctacatgcaataatcatcttcatcgtcatccacatcatcatcatcatcatcactatcagcatcaccgtgtcccatttcccggcaaccagaagggcaagtgtcttggtttttcttccattcgattccacatccatagcaaaactgatatccacatctatacaatgcataaagacattatgaaatataaacttttcgaatgaactagcttaatcgagccaaatatacatatatatgtacctgcaagtcatgtgattgcaaccatcagaaagttcaatcaagtgcctacacatgacacattgacgccacatattttcgtttgccagtaactttagctttatgtcatcaactaaaagttcagggtgaagtttcttgtaatcagcacacgacaaatcagaatgtgatggtactttacaatcaatgcagaagagtccattgcatttgacacatgtcctaacattggattggtccaaggcttcatcagaagagctcgaaagctcggttatggacatcaacaatgagcagtttggatatgggcagtagattttctcttcagcgggaattagagtcctctttcatcttttgttcccacatctctatcagatttggtgtcaaaaccttgctacaactttcaagagtgagctctaacttgcattcataatcaaggcatgtgggcacaattccgctaagtagtttcacttccacatactgtttaacacaagaaaagcaataacgatgaagacacttgtcagtaaaaaacatgcgatcagctacggtttcttcaagacaaatgacacaagtttctccttgtgcttccttcacatttacgctactgcttttagagactatttcttctcttgcaagtctataagcaaacttaacatcgttcctggcaaccaaaacagcttcactaaaagtcatttgttctcttaggcgtttgacttcttccacaagcaattttcttcttaggcttctctctacgtaccaattatctgcgatgaaaataattccttagaccaagacattgtaacataacaatcgaagtcattatcgtcttaatttaactactcccatcacaagatatactactaggttattccagatcatgctaatgtttataaaagccatttctcacaagaagccaacaattagttaaataaccatctaacgtgaaaggactattcgaacttctcatttacataccagtttctgtgttgtattccatgacgtaatacaagtacaaagatgacctagcttgaagctaagctagaactcataaataatattttctagttacatgaacaaaaaaaaaaaaaagtaacaatcatccacaatattatagtcttatgaatttctaacctaacataagcaataaaaagagaaagaaaacacttacatattggtaaatttgatggtcatcacaataaatcaccacattcataaacccgaaactgaggcattcacttagcccacgaataagtgccacgatctctactcctttgcgactaatctcggcgttgctcagtgattcctttatctcaaacaaaaactcatccgtgttgtcacaaatcgcaaccccaaatccagcattcacgattcttttgccgccttcagctagcgtctggtcgctaaccaaacccttgaagtacaatctgtaagattgtgttgccggagaggcggagttgacgaccttggaactatcatcgcctttagggtttggactattttctgttgtcgcagaatctatccgccgtttttggaaagtcaagttaatatcgtctctttccatgactgattagtctccaatttttcttgtgaaaatctagctatatatatatacagatgaggagagagagggaatatagcttgcttgagaagttattaaataaattctcgttcactgctctttatcaaagttccttaatatttgcaagcgtattttgttaatgagagtgtcgattgattctctaaattttaaatttctataatctttttttttatttcgtaggataatttctataatgttatagttcccttttctgtattttcttttcgggaaaatctacattattgaatattgatttcaaatcggaaaataacagaatacaaatgacaaatgttaattaaaatctagaaaagacaatttacttatgtatatgtatattaataattttttaaacaattacgagaattaagaaaaacataaaaaaaattttgtaattattgcaatgttaagaaaaaaaataatgtccttaaaattctcaaagatcataaagaagaaaatgcaaaagaaaaagatggaatgcatgtgttcccaacttccaatactaaatctatgtgttgatccaaacagaaattaaagagaataataatctctgaaaaagccttcatcaaagcctcctttatcgccagttaaaccgccataattgttgtagtcgtcccaaatgtaatcatctccatcagcattcctttcttcactgaaaaactgctcaggagaaggatacttgtataccacatcctgatcatccctcggcgcatcgtagctgcaagaaccatataataaaataaagtcaatcacaacaatgcagtgagagtttaagaatcaaagtagtaaaacaaaagggcaaagcatcactgtgcggtttggtgatccacaaaatcttcaaaatcattccaacgaccaccatcttcatcataatagcactcgcacatatcctcttcacaatcatgttctgagtcgtcatcatcgctatcttcatcatcataatcaccttgtcccgtttctgccattcaatcccacattcatagcaaaactcataaccacatctacacaatgcaagcacaaagaaaacattacaaaatgaaaatattcatatgatgtagcaaaatcgagttaaataaatatatatacctgcaagtcatgtggttacagccatgagaaagttcaatcatatgcctacatttgacacattgacgccacattttgtcgtttgcgagagacttgagcttcaagtcatcaactagagggtcagggtgaagtttcttgtaatcatcatacgataaatcagtatgcgatggtactttgcaatcaatgcagaatagtccacaacatttgacacatgtcctaacattggataagtcggcttcactggatagttcggttttggacatcagcatcgagcagtttggatatgggcaatatattctctccgcagcgggaatggagtcttctttcatcttttgtttccacatctcaataagctttagtgtcaacactttactacatctttcaagggtgagcttaaacttgcatccatattcaaggcatgtgggctcagttccgctacgcagcttcactttcacatgttgtttcacacaaggaaagcaatgacggtgaaggcatttctcggtaacgaacatgtgctctacatcggtttcttcaaaaaatatgccacaagtctctccttgttctgcgttcacatcaacgctgtttctgcctatggcttctcttgcaagtctaaaagcaaacttaacatcgttccgtgcaaccaaaacagcgtcaatacaggccattttttctaaaatgccttgaacttcttccacaagatggtcaatcttctttttagacttccctctaccaattatctgcaatgaaaatcagatatattctccttagactaagacaatatatcatcaccgtcaaagtcgtaatcatcattactcttctaagattctacaataattactagttttgatttgaaaaaaagctcaagttactagttgttaagtggtttttggtttttatttcattgaaaatatattttctcacccttcaagatattaaaaaaattagaatttccaacgattttggaaaactagtattttattttgaatggtttctccatgtttcaaagaatactaaaaaccatgattttcaggtttttgtggaaaactatttttttcacaagatttgtttcatctctgaattttttaacttttatttttatttttataatctatagcaaaaaacgaagaccaaaatctaaaactaaaaacaaattaaaatcatcatcgtttcaattatatgtgacatttatctttggagtgcaacttaaatacgcactacgaaattcagttactcataaaaagaagaaaaaaatattgtaacatgcaaaataaatcaatagtccacacactattatagtctcatgattccaaaataactaacccaaagcagtaacaaagaagagaaccacttacagattggtaaatccaatcgtcatcacaataaatcacgacatttctcatccccaaatcgaaggattcacttaatccacgaaccagtgccatgatctctactcctctacgactaatctcaatgtctctaagtgattctttaatctcatgcaacaaattatccttctcatcgcaaatcgcaaccccaaatccagccttcactgccttttctacatcgtccgcaaccgcctcataattcaccaaacccttgaaacacaatctgtagacaacattgtccataaattttgccgctggagaagaaccctcgcctttagagtttggaatatctccggttataatagaatttaggccctgttcgtttgcttgtcgctggcgactgaaaccagcgacaacgaccaaaagttgttcgtttgcctgtcgctggttcagcgaccaaaaatagcgataatcgccagcgatcagcgaccgcaatttttggtcgctgaaatttttagcgatcagtcgctggttttagcgattagtcgatacttttgatcgctggatccagcgacatgcaaacgaacaacttagcgatcaaaaaatataaattaaagaataaataaaaataattaaattaaacagaattaaattaaattaaacttaaataaatatcatatatgcatcatttggagttagatttgttttaaagaaattattatataaacaaatttataatatttttatctgcgatatcacgaagggtttgagttttaattcttattaaattaagttaaaataaattaaattcaaataacataaattaattatagtcaaattaaatttgataaaactaaaataaataaatatattaatttatttttctcatggtgtaggatatatataatttacattttgattttaaaatataaattagcaccaaaataattaattttaaaaaaaaatatagcgactatttataacgacagtcaaacgaacaacacagcgacaattattagcgattgtcgctgtaattggtcgctgagtccagcgacagacaaacgaacaatgtatgttgtcgctggttgctgtcgctggttgctgtcgctggttgctgtcgctggtcgctggtcgctgtcgctggatccagcgacagggaaatgaacagggccttaatcgccgtttttggtatctcaactcttgatcgtgtctctccattactatttaggtttttagtaatttttctctggaaaatctgaagactaatgtatatagaggaagaaagcgagagggactactaaagcgtgcttgagaagttgccaaataaattttgttataaacgcaccgtaatatctgtaagcgtttttggtttggtatcgattgattttctataaatgtttaaattcccattaatatgcatttatgatacgtttaacgaactgttagacgaatcattaagtaaggaatatacctaacgaaaaaatctacggaccctaatcatgcttttggaaccttcccatgaaaaaacttattggctctcttattcacttctttttaaatagccaatcaaaatttaacaatatatgtaatattatattttgaaataaatcaaaattcaaattagaaaataaaataaattaaggaaacataatatgtatatttaaaattgattatatttcggtttgggcttataaattagtattatggtttagattttacaattaaacaaaaccatttgttagttttagtttataaaagagtgtttattgtttatgatttaaaaggaggtgaagaattgttctcttcccatcttttaattttagctttgtcgatcatgtgttaattcccatttgtaatttacttcttctttgttttgttttctaaattacacagaaatttgagtttgatgaaataaaaaagagctaccgtgcgctagtgctttttccatcatctaaattacactgagaaaaaggttgaaataaaaaactaacaatgaaagaaaccccaaaggtgttactacctactagaaaccccaaaggcctatagtgtctcaaaattcttaaaaatatcagatggaatgtatttcaaaacaaactaatgtctttgatgatccaagcagaaattaaagagaataataatccctgaaaaagttctcatcaaagcctccagaaaacagttaaaccgccataattgttgtagtcgtcccaattgtcatcatttccatcagcattctcttcttcactgaaaaactgctcagtattccacatcctgatcatctctcggcgcgtcatagcttcaagaaccatataacaaagtcaaatacaacaatacagtgcaagtttaagaaacaaaggagtaaataagaaagttaacatcatttttggatttgccatttgctgatcaatatattcttcatagctaggccaacgacgaccttcttcatcagaatagtaattacatgtatctacttcaaaatcatattccggttcattataatcataatcatcataataaccatgtcccgttagtaggcaaccagaagagcaagtcttttggtcattcttccattcaacctcacattggtaacaaaactgatatccacatctacacaatgaatgcacaaagtttaacattacgaaatgaaagtactcgaatgatgtagaataatcgagttaaataaatatatacctgcaagtcatgtggttgcaggcatgagaaagttcgatcatgtgcctacacattttacactgacgccattttttgtcctttgctagagactttagcttcaactcatcaactagagggtcatggtgaagttttttgtactcagcacacgacaaatcagaatgtgatggtactttgcaatcaatgcagaagagtccacaacatttgacacaagaacggtcattggataggtcggattcactagaaagctcggttttggacattagcattgagcagtttggatatgggcaatagattctctctgcagcgggaatcgagtcctctttcatcttttgtttccacatctcaatcagctctaatgtcaaaaccttgctacagctttcaagggtgagcttaaacttgcatccatcatcaaggcatgtgggcacagttccgcttaggagcttcacttccacatactgtttcacacaaggaaagcaatgacggtgaacgcatttttccgtggtaaagaacatgcgctcgccctcggtttcttcaaaacaaatgctacatatctctgccttcacatcgtcccttgaaactatggcttctcttgcaagtttaaaagcaaaattaacatcgttaagggcaatcaaatcagcgtcagtataggtcatctcttctagaagaagttgaaattcgtccacaagatggacaaccttcttcttaatcttccctcgaccaacaatctgtaatgtaaatcagaattcactctcattaaaaccaagacattatatcatcattccaaagaattcaaagtatattctaacatgcaaaatcaccaatctggcctctaactatttccacacttcaagaactaaactaaagcaataacaaagaagagaaaacacttacatattggtaaagcagttggtcatcgcaataaaccacgacttgtctgatccccaaatcgaaggattctcttaacccacgaatcagtgccatgctctctacttctatgcagctaatcttagtgtcgcttagtgattctttaatctcatacaacaaattctccttctcatcgcaaatcgcaactctaatccagacttcacggtcttttccttaccttccaccaccaaacccttggtgtacaatctgtagacgacattgtctgaaaacttcttcacagcagagtcggataggacgactgtagaacaaccctcgcctttagggtttgggaaatctccggttatggtagaatctagtcgccgtttttagtaactcaagtcttgatcgcgtctctccatgtcgttttggtttcaagtaggaaaatctgaagacttatatataagagagaagttgtcaaataaattcttattaattgctttgctatgaaggcaccgtaatgtttgtaactgttattgtattggtatcgattgatttttcaattaatattgccaaaccctagttcctctaatccatctcccaaaacttatcaatttatcgttagacgaatcatgttgtttcttttaaattttaatcttggtttgtttttatctcaaagagaaacatatgagtgtagtctacatactaaaaaaagagatgcgaattaaaacgtttcttttataaagtagtgatactgttaagcatacaacacacttttcagtctgaaattttctccagcaatttctctaccatgattctctgttgtgtcccgcttaaagtttcagaattcatcaacgcattggcgacgataatcactatacgaggagcagccgcatgcacctgaaaccagacagaagatattaaccatgcgatttccagttgcattgtttggattcttaagaagcaatcactgtttttcttacccaacatctcccatttaagccaaacgcagtctcaaacgagagtttctttccaagagcttcaaggaccgggcaagttggtgaactcaacaacctaataagaacaaagtgtaagagtgagaaaaagtcgagaagaggccacttcatctagaagaaaaataaaggaataagagtgaaactcacattctagataaaccagttgaagtttcaaacatgaaaccatcttttaagggaccaaatcctgcagcctttccactttctattacattgtccaacaattctagtcagcaattgcttagtctaaacaattaatgcggagaaacaaggaaatgatttaactttttaaactttgtgagaaaaaagaatggatggactaaccgtctacacatgacagctccgggttcattcctgtgtttgtcttcacaacccgagtataaagcagagtgcttacctgtatcaacaaattgtcacaactcccaaaaacacgtgatcactatgttatcacttaatacagcgaatccacttgaaatagagttgatgagctcaactccagacgaagtaaaagtgcctattatgctcataaacaaaccaatgaagtactggatcctttcaatatcacacacaagccattgtaatttccagggaaattctcaatacactgtaatggcaatactaacatctcaaacaactgaatgcagttaccagctagagactattttgatgatggttcagattgaagaagtatattcagaaggtacttgcctcaaacttgggataatttcttctgtttgctccttcaaatgcaagcacaggcaaaagagccaattgtggtcctttaatgtctatccaatagttctgcaatgaaacatgtgtcaaaacgattttcaaaatattatgatctactttgttacatgcaacatgactttggctgagaactctaggggcaacactctaaataaaggcttatgccgttttctttatccatgatctcaagtatttattaacatatacatgtaactaacaaacaagctgagcaatgatagaagttggataatgatagagcacaaccgaaatcaatattctttatacatgatttttgcattaaatgaactgtatacagagaaaaaatgcttgattcagagggtccaagggaaaaggatctctaacaaaaatttaaggatcgtctttagagtacttacttctcctttacaatctaccacaatgccaagaacatgatcctcaggacgaggtacatactgcaaaaaaaacataataacagagtcaaaatcgagtaacatggagtaattcttcaaactagagagcaaaaccaccactttttcgacaagttaagcgcagatgaacaatcgaataactagtagagctaggagatatcaggaaaaaggtaccaatttattgcaaaatacaaccagcaagaaactaattagttctcacccttttatgagaactttccacccaatacttatttggcttagagtacctcaacttcccagctctcataacagatatcacctcattatcctgaaaaaacctcaaaatcatatgtcaatcttctagccttgcaagcccaacaaaaagcaaactgtagattccaaattaagtttattcctcaaatgccaatgcaagatccaaaattcaacataacttgtttaataatgagcaaaacattcattaattcattcatacactcaacacaacaaatttcaaactccaaaaaaatgatcgaagatttggaacaagtgattttgagaaagttaaaaacctgacggagaccactgccgagtttgattgtttggttagtcatgtttgataaatcgagaacaacatcacctggaacctgaaacccatctcacaaaacttaatctttcaatgtaatcccaatctaaaacgataatcaaagaagcagaggttttagtagaaaatacgcacaacagtctgatcaatgaggcttgtcggcgaggtagaaacttcagtacccatctttcttatttcttcgctaacaacaccaattgatttatccaatgaagggagacagagcaaaagcagaactgagaggtagagagaaagaagaaccctaaaaaacactaaaaccctaaagttttttgctttggtgatgttgaagacgatcggaaattaaaaactccgaaccaagtaatttactataatggttatgagtggtttatttcggtttagtagatccatatgatttggtcaactaaaaagtctccttcgtccttcctttttttttgggacaaaatgacacttctttcactgattttcaacgactgctctgtggaccatgagtgatggatggtagttgtttttggtgaacaagaaacaatgacactgatggtttcgaattttacaatggattaggtgatctgatgtagacatgtgtgtgcatatacatcaattaattacataaagaagaatctgactcgcatattcaaaataagggatttacgtcactaaccaactttctgctctacttttctctgtacatggtatatctattctataagctcttcaccttctgcgtttttcgttttcctctttcacagagctcttaacctgcattgcggaattcaaatgttttctcaatttgatattctcctcagtcctcatacatatctgccattatcttcctcagctcatcctcagaagcagtctcatcaaaccctaacagcagttgcgcctgaaaatatgccactttcaaatttaaaacgaggaatccagcttggcgattttgagccatggttatcgaatgtaaacatttgaatacgatttttcttgctacagatattaaaggagatgcaccaatagcttacctcaatctgatcttgcaaggcatttgatacttcagataagtcttctctgttgttactggactcatccattgacaagtttgtgttgttcactttaagcctgtcgtggagaatttcacagtcactatacagccttcttcttgcttctagcgtgttctcgactattatcctttcctgttggaggagtttctgaaaaaattaaacatgtttcagtatgttttgatgttctttctgtaggatcatatacatttaccacaagcggatgatgcaagcaataatataatgctttttatttacaagcttaagatttacctcagtgtcagacttctctgtcagcgatcgagtcagttccttttccatttccatatgtgaacgtctcagggatttgacctctctgacaagcacttttatgtctgcctttgattttgcctccagttcaacataccgtctagaaagatcttccagttgctgttttgtggcatccatttcttgtaacagctcatggctctcagagattgttgagtttcctgacgtcttagaatctgaactcccatcctgtattagtttgcaggtgtcagtaagttactttgctagatataaattactcgctcgatgtgaacttgcttaattgtggaaagaatgtgattgagatggaactatttcaaatttcaatacctcttttgactttaacttcagttccatctcaaaagttttttgcctgagttcttccatatcccactgcatcttggtaacactctgtctctcggtcatcaaagcttgctccaaattctctttgtttctctgtttagtagtttcaagttccacttccagatcatcaacctgaacaggaaaaccaagattacatatatgacattcgcatgaagagtaaaggaagaagcgcagatttcattaccaacaaacttgaaaacagatgtactattattttcaatcatgtacctttctgttcagatattccttcaccgctgtctcttgatttagtctcgctataagatcctccatgtctgtttttgaattgagaagtctctcattcatagttaatagaatcctatttaatttactatgcattttcagcgggagaactattcgtccattacccggtatctccaggttaccaacagatatatcatgattaacatccagctggctatgtacaatggagctcaagatactagaggttgatgtctcaccggctagtaacgaaaccccgtcagcgctctcaagagaaagctttcgatcatgcatcactgagtgactagtttctgattcagagcgacaccgtaagtcgttgtttgctcgaaatacacctttagaagcttttccattgtacgaattcgtctctgtgatatcattggcatatcctaaatggactctgtgcttaggaaaatcttctagctgctcgataatagtttgactcatactcagtccctcgtcaatgttggacatgctaaactttacaagcttctctgttggatttgtcagatcttcatccaaagttagatctccagtatcagtttcagaaacatcatcctgacctaaacttgctgatccgagctcagatgtttcataagcagtatcgctgccatagtcagatgagagcaaagaactgccaccagaatttgggtgaactagagacgacaagcttgtgctatttccatcatcattggaatcggaagcattctgatctacaacttggcatgctggaacaaaaaaaaattcaactttaaattatagtgaaagactaagcacatttacttaaacatagattaactaactgcctttaagaatctttatcaaacggtaactgtaatactataatgggctcataccagacctagcagtagcttctagttcgaggaaggatgcaactacaacacttcttgccaattctatatcagataacaacttcgtcatccaatcctccagagagcaccttctctgcaacaacaccacatctttaaaatgagtgtaatataattcttgagtacagtactttacatatacttctacatgaaacctgcgtcaaaatgttcttgattgaggaaccacaaaagcaggaaagcgtgaaagagagaaaatttgaaaagaacaacatagctccacaagagaatgcatacctcttctaacatatctctacttttgacacgcaaaaatcctttaggaggagctgatggaaaacttttcctaggaaatgctcttttgagctgtaaatcatatgccataaaacacattgcagttaacttgtttgaatcacactgaccaaaaacaactacaaatcatgttgaatatcattgagttgagaaagattgagagaatcttacatcagctaaaagctttacaaaatcattaaatctcctcagaattcctcgcattgtgctaacaccttctggagattgcacacttacctgaaccctgtaaaactgtacctcaagaatgtcacatatatcgagcaagagttccttggaatagttcacgaaaatacacaacttcgataagaacaacaactagctatagaaaaatctacactgtgtagagagagagatcgaaacttatttaccactataggatctgaatttttcgattttgaaagaagtgtccacgatggtatagtgacacaataactccatccagttcgaaaatcatgaggccaaattgtatctctaccattctgcacaaaacttcaaacttagtagtcccttaaaactcttgcctcttcatatagcaaaatcattcacacatcaaattgtggtagctaaaccataacagagcatgaagctaacaaagaatctctcagaaagagaaaatcgtaagttgtcgtgaattgcagaaactcactcacccaattacgcggtggagggctccaatccattcccagtggaagtggcgatgctccatcgtgtctatgtttcggtggactccgtctttgcatgatctcaccaaatctgatcgtccgatcacatacaaatcggagacgggatcgagtttccgattcaccgatccaaaaaaacaaactacgggaatagagatgggaaatgcttaagtttaatttttagttacagatttttattccctagctatgagcagtaaaaattctccaatttgttgtttacactacgtaaaaactttagactcattttgagttttttcctatcacgattaattcagtgccagccttgagaaatatataaatagcccaatacaataaaaactctataaattaatacttgataaattaataaacacgataaattaataaattttgccggtcccaagtcgggcttatataaaaattaaccaaaatcgataagataataaaataatagtttttttgaaatccgtctgtaaaattatagtctcaataatattataaattaataatcatagatcttaagtatatattttaagactaatttttatatgaaatttttgttcaagctacaattacaactctgtttattatacaactggtatgatctctgttgtattcatataattaactatttgcgtatttgatctgtcatagttgattttgtaaaatcttttatttgagaaatcattgctatgatttgagtaaagagaaattggattaagcttcatgtttacgtttacattcacgttaatatcgtagatatatagacacaatatcttgccgaaaaataaattaaagaagtcaaagaaaaataaaaacctaacataattatatatgcaaacaacaaagcaatagaaaattaaactaagaaacattttaaaaagaatataatattgtattttatgtaaatacttctataaattaatatcactataaattaataaaatttcatggtcccaacattattaatttatagagtttctactgtacaaaacaattttttataatggattttctagataaaatttaaaatttgatcaaattttaaaaagtggagcctatttttagtcaaatagataaacttaaaaaattgagacttaatctgaaaatttagaatgtgggatctattttcgcaataacaaatcgttttgacgcctaattttgttattaaaacatttaaaaattttggaaacccaatatacctatgctttttgggtattgggccggacctgcaagtatgtagtcttcctcgatttattctagccggtagtgatagcacatgtattaatatggatgagttaagggtcttttttgcataaaatctttaaatttattgttgcatgtactaatcacaatggctactacgagaggaggaggatgtagttctagaagtgaaagatttttctctcttagaaatgttgaaaacttaagcaatcgaatccaaaacaatcagagataacagttgcaatggatgatgtcgtggaaaatgaaggagacgtagtttaggttcaaaacctagtatatatagatgatgtattactatatttaaatctatattgtaacatgataacaataataatggtgagtatggtttgagatttattgtaaataaatagttattaaggacaatcgtaaccacataaacaaataattcgtcccttggatgatttaatgcatctaccatgtccttttggatttttctttaagcacatggaacgacactcatcgtgaacacaattgttttcttttagagtcgcccaacatcttttttggtcaacactcatatttcccaccactcctgtcatatgtttaaaacataatatgttagtctctatataaaaaaatactattttatttattttttcaagaaaatatatatttatgtggatattaaaattataattaagcgatttaaaacatcaattaagcattttttgattcaatattttttttcttaaaaagcatgcagttgtaactgaattttataattatatggagataaagtatataacatcaatagttataaaacagaaaaaaactgtattttgaaacatttatatatatgcagcgcggaaagagaagaattggtgatgaaaaaactagaatcaatagaagtatgtttaatcaattcatgtcacaatagttctgtataatgtgttaagcgttaagaccatagaactttacggaatcaggaaattctgaaaataataattattgggatccgtttgttagggatagctatggtatgtattaagacatagaaaaagctaaacttgatactatggcaatctatattgtacaaagaggatttgacacaaatttgtatagcataggtgagttgataataatatattaaattcaatatgctatttaaacttttttggtcaactagtttttataaagtaaaatttctacaacgattatgggtgatataataaaacaattataaatgtaaatacatacctaacacaagaacggtgaagataatcaaaatgacgaacgagggttgaaagtatttcttcatcgtcgataatagaaatgaattggtagtgctttaaaaatgtaaaatagataattaaacctactgtaggcatgtagcagctatatatataataacgtagatgtatctcctatttaagcgtatctaatatagtaatattaagctatgtaccaccacaaattccgaagtagaaggatttcattttaactacaaattccagtttttatgtttgttttattttttgcttatgtgacatgtgtaagccatagactcgcacatttttctgctttaccataagattaccatgacttcccaatttaaatataaatgatgaaaattcaagaaagacctaatcacattgatccttatttttcttgtcaattcatttggtaaatctgtttatatatagacatctcctacttgattctgttttttagatctcatgttcctaatccaatgctagactcggttctattgtctttgtgcaagacagttggtcagcatgagtagcagggctgatccgatatatctaaatgccaagccactagctaaaaaaatcatgcctctttattaaaataaaaaaaattcgtagaaacacaaataagattaatataaaattcataataaactatataaaaaaaaaacagagactaatttcatatccaacaagacaacaatctaactatctaagacatgaattattattatatgcccttgatccttcgatccaatataagcaaaagaaatcacatgtcctttacggcctttaccaaattaatgtcgattatcagatttatttctctattaaaagtacttaccgtatggtcatgggtggaggctagcatttcgaaaaccttgcagtgtttctttgagtttccagagttattgataattaaaaagtcgatatagttactacttgcaagatatcatgcatggtctcttctgttggtttactagtttgtaattttcttatgtatattcttctatataccaaataggcaaaaatatatctacagttctttgaaagtaatctcatcatcatcatgaaatgaaaaaaacaaaataattctaatcatgatgactgatttcaaacattatacaatgtagtgatacgacaaatagaaattagtactagtacatattttaatagtatgtcaacaaaagtctcaacctcgtggctctacctccatgaagactcgtggcaaagatagagaaagaggtcatatgtgttgcagacatatgaaaatgaattctctttattatctctctgattcatttggttagttcgattcttcacagttaaccatttatttagtatttcttccgatgtcgatattatacgcgttggtggcgcgtggaacggtggttcttgcggagttaagcactacgtccacgaacgctagcacgatcgcgaagcagatccttgagaagatccctggtaacggcgacagccacgtgtcatactctcaggatcgttacgtcttccacgtaaaacgtactgatggcctcaccgttctttgtatggctgatgaagacgccggaagtaagtcttttgagcttttagtctgttactatgataacactaatactcaatattttgttccttattttggttaatgatcaataaattaatcattacttagtttagaagacagagaccagattcttgaaatttgaggttttatgaatttggtgtttatgatgagtaacaacctttgagaacagagacaatgaaataagaagagtctttaaaatgttcccaaagttgtgaagtagtagagattgagattcttttttctttctttctttagtttgttgttatgtgttaatgtacttgttttgagtgttattttcagggaggattccattttcgtttctagaggatattcatcagaggtttgttcggacttatggccgcgcaattcattcggcacaagcttatgctatgaatgatgagttctcaagagttcttaaccaacaaattgagtattactctaatgatcctaatgccgatacgataagtcgaattaagggtgaaatgaatcaggttttgtgtttctccataatttgaaacatatatagtgcaatggttatgttttgctggcttcaacggattctctgttttgtatggttatgaataggtgagggatgttatgatagagaacattgacaacattcttgatagaggtgaacgtcttgagcttcttgtcgataaaaccgcgaacatgcaagggaataccttccgattcagaaagcaaacacgtcgtttcaacaacacggtgtggtggagaaattgcaagctcacgtatgttttcatcaaccgtaattccttaccatgtttgcaccttaagcatgacttcaaatggtttaatcttttcgatgcattctcgtgtaacgtctcttgtaggctactcttaatactagtgttgttggtgatcatatacatcggtgtggcctttgcttgccatggaccaactctaccctcttgcgtttaattaagtgagtgaatctgtcatatgcgcgcaatttcgctgcgatcatggatttctttgtatgtattggcgcagcttagatcctctgtttctagctagctgtatgactatgactgagataagttttatttgtataaagcatacatggaagtgaaaacgcatttctttcacaagtgtttgaagtcttgttataaccatatatttgaactttggcatgtgtgtaaggtcatacaagggttgattgattctttagaaatggctaatgggagcattttgcacacgtctgacattgataagaaaatccactataccgttttataacactttaaccgctttaattcggttctgagaccagaccatgcgggcatggcctatgtggtggcgacacaaagaaaatggatttggaaagggggtggtcttccgcatcaacgataaaaggtgacctaggcgcatcacattttcatcagacgcataaccgttcacacccatttgcgtaagccatagactatggcccatagttggtgatgagaagcgtacatcctaaggaatgagtatgataacatcgttatccaaactagagtcacacacaaatatgttaatgacgtgttataacttataagaagctagcgcaccgaacgtggtgtacacgtagtttctgccataaaccaacatatggacagtttcgatataccaatacaatttgggtgattcggacccaataatattgtttccttatgaatatgatttttaatgcctttgaaattattattttatctaagcgagcatagaaggatctagaagatcataagataattaaagaatatatattctaatcaatcttatgatgttctacatcgtactatacgatcactcgatctttattgtaaaccattaaccctaatatcgggcatatccacacactgcctgtccgacgtttattaagatcctacggaagatttttttttccacctttccaaaatgctatttgaattcatatataataccagattattattatttttgccttaccaaaaaaaatataccaacatcttttgttcaaaaaaacgaaaaaatagaagttcaaaaaaaaattgcaaaagagaagagaagagttgataattatttggaggagaagagagttaactataacaaactttcaaaaaataaaacaaaacattttaaatagccctttttcagaaaaacaaaaatatattttaattaatattgaagtcaaaaccaaaaacttaaacctaagccctagataaaatagtagtactgttggatgttataaaaaaaactgccacagaaatgaagaagcagatctcgtcggaggcaatgttgtcgtcttcttcatcagccgcagaccaatctcacccctccatttcatcggagaagcctctctcctcatctagagatgaaagcggaggtgcacaagagatcgtagccgtcgatcgtccaggagagtacacggcgttgtgtagatggacggttgagagcttcacacgtgtcaaagctaaggcactgtggagcaagtacttcgatgtaggaggatacgattgtcgtctcttggtttatcctagaggtgattctcaggctcttcctggctccatcagcatctaccttcagatcattgaccctcgtggaaccagttcatctctgtgggactgtttcgctagctaccaactctctatcatcaaccatgtcgatgattctctcacaatccgtaagaattcttggcatagattctctaataagaagagatctcatggatggtgcgatttcactttaaactctagtgttttggatcctaagatggggtttttgtttaacaatgattccttgcttatcacggctgatattatgattctcaatgagtctgtgagctttagtattgataataacaatgagtccgtagttggatcaatgactgatgtgttgagtggaactttcacttggacggttgaaaattttagcatgtttaaggaaatgataaagacacagaagataacgagtcctgttttcgtagctggggagtgttttttgaggattggtgtttaccagagtgtggttaatgcgcaagagtacttctccatgtgtttggacagtacagataccgaaaagagtgttttatcggacaagagcagttggtgtttatttagcatgtcagctttgaatcagaagcatggttgcactaacatgaataaagagtcttatgggaggtttgctgctgataataagagtggggacaatacaggattgggatggaacgattacatgaagatgtctgactttgtgaacccggacgcggggtatttactcgatgacaaggctgtctttagcacctcatttgatgttatcaaagagttcagtagctttactaagaatgggactggaaatggatacatgggaaagttcagttggagaattgaaaatttcacaagcttagttgatcttcttgagaagaggaagataaccggtctttacatcaaaagtaagaggtttcaaattgggaaccgggattgtcgacttattgtttatccccgaggtatgtaagttcacactagatttctcattgcatcttatgttatgctgttttatatggtagagactataatgtcggttttatattgttgttgtaccttactcttgatggtctcagggcagtcgcagccaccaagccatctttctatatttcttgaagtgacagattcacgaagctctagtagtgattggagttgttttgttagccaccgactatcagttgtgaaccagagatcagaggagaagtcggtgacaaaggaatctcagaatcgattctcgaaagccgaaaaagattggggttggcgtgagtttgtgacacttactagtttgtttgatcaggactctggatttcttgttcaagactctgttgtattctccgttgaggttcttatgttgaaagaaacatctctaacaaaagactacacggaggcagaatctgctagttcagtttcacaaattgataaaaccgtgaaaagttcatttacttggaaagtggagaatttcttggccttcaagggaataatggaaaaacgaaagatatttagcaaattctttcaagctggtggatgtgaacttcggattggtgtatatgagtcctttgacaccatatgcatatatttagagagtggtcaatctgcgggtaacgatgtggataataatttatgggttaagtacaagatgggtattctgaaccaaaagaatccggccaaaagtgtgtggaaggagtcatctctatgtaccaagacatggaataattctgttctactgtttatgaaggtgtctgatatgttagaggctgatgctgggtttcttgtgcgtgacactcttgtgtttgtgtgtgaaatattggattgttgtccttggtttgagttttcagacctagaggttagttcatactttatttctttcttaaacattgtaattatgttactaaacattacattatggaactattgttttggcctttatttttaggtcttggcttcagatgatgttcaagatgccttgaccacgaatcctgatgaagttattggttctgagaaaagtgaggaagacacattccgtaagtgatttcgtgtctctatcagtttctcgtctttgttgcgattagagatatagtttgctaatcttggctaattaacctaagaattttcctcatgcaggtcaggtcagtccgtgagaggcttaaaagtctaggtgctgatattgccgaaaatgagacttaggacatcaacggtgacttcgttcgtgggtctttgatttaggccattttgtttagattttgaataaggcttggttttatattctactttttggagactagtgtgtttaagttttaaggcttaatgttggttgaaaataaaaaagaagcttaaagtttagaattgacatttaaaagatttattaatttatccaatttagttaaaaccatgatttacaaaattgtttattacaattccttacctttataacaacaatacatccataatcaattaaaaaaaaaacaaattaggaaaatgaagcttcatcaaatagtgattttctactttttctatggggtcggagatagattgtgaaataaaaacacatatgttttataaaaaaaccatgaacttatgactctattgttaaccaccataaataaatatgtttggtttattaaacaatgtatatctcttaggaatggatacttctagattttgatatttctaatttcttacaaaatttgtgagatgagatgataactacatcaaacttttttcaggtctaaaaaatgaaataaagcatgaaatatgttaccaaaaaaggaattttattttttgtgataaaagcattttggacaacgaaaatcaaattgaaaagaaaatgaaacaaaaggcattgggagaagtcgaggaggcgcatgttaacacaccatgcgcacgttaaatcctgtctttgccctctctctgtagcgaaacaaaaaaaagaaaattgatcaacctagataaaatagcagaagagaagaagctgtgagaggaaaaaaaaaaaaattgaagacaaaaaccgccattgaaatgatgaagcaaagctcatcggaggcagtgtcatcgtcttcttcatcagccgccgcggaccaatctcatccctccgtttcatcatcatcatcggagaagcctctatcttcctcttcgatttctccagcggaggatcttcaggttggatcgtcgagagatggaagcggaggtgcacaagagatcgtagccgtcgatcgtccaggagagtactcggcgttgtgtagatggacggttgagagcttcacacgtgtcaaagctaaggcactgtggagcaagtacttcgatgtaggaggatacgattgtcgtctcttggtttatcctagaggtgattctcaggctcttcctggttacatcagcatctatcttcagatcatggaccctagaggaaccacttcgtctcgttgggattgtttcgctagctatcgtctctctatcgttaatcttgtcgatgattctttaacaatccataaggattcttggcatagattctctagtaagaagaaatctcatggatggtgtgatttcaccttgaactctagcattttggatcctaagatgggttttttgtttaacaatgattcgttgcttatcactgctgatatcttgattctaaacgagtctgtgagctttagtcgtgataataacaatgaggggcaatctttgtataaggaaaattccatagctggaccaatgccggatgtgttgagtgggaagttcacttggaaggtaaataattttagtttgtttaaggatatgataaagacgcagaagattatgagccctgttttcccagctggggagtgtaatttgaggatcagtgtgtaccagagtgttgttaattcgcaagaatatatatcaatgtgtttggagagtaaagagactgagaagactttggtttcagataggagctgttggtgtttgtttaggatgtcagctttgaatcagaagcctggttgcactcacatgcatagggattcatatggcaggtttgctgctgataataagagtggggacaatacgagcttgggctggaatgattacatgaaaatgtctgagtttgtgaacccggaagctgggtttttactcgatgatatggctgtctttagcacttcgtttcatgttattaaagagttcagtagctttactaagaatggtgggttgattgggggaaggaatggggctggagctaggaagtcagatggacacatgggaaaattcacttggagaattgaaaatttcacaaggttaaaggatcttctaaagaagaggaagataacaggtctttgcatcaaaagtaagaggtttcaaattgggaaccgggattgtcgacttattgtttatccccgaggtatgtaagtgtactagattatctgttttatacggtagacatggaaccaacaatctccttttcaatattctgtttttccttcctatgagctgtctgattgctgcatttgtagtgttgaatgtctgaactgatggtcttactcttaatggcctcagggcagtcccagccaccatgccatctttcagtatttcttgaagtgacagattcacgaagctcaagtgattggagctgttttgttagccaccgactatcagttgtgaaccagagattggaggagaagtcggtgacaaaagaatctcagaatcgctactcgaaagctgcaaaggattggggttggcgtgagtttgtgacacttactagtttgtttgatcaagactctggctttcttgttcaagacactgttgttttctccgctgaggttcttattttgaaagagacatctgctacaaaagagtatgtggaggcagactcaactaattcagtttctccgactgataacagcgtcaaaaaaagttcatttacttggaaagtggaaaatttcttagccttcaaagagataatggaaacacgaaagatttttagcaaattctttcaggctggtggatgtgaactccggattggtgagtggttagattttttccatatctctaatcctggattattaatgtttatgatctccaattgcttaatgtgtgcctcgtataatgcaggtgtatatgagtcctttgacaccatatgcatatatttagagagtgatcaatctgcgggtacagatgtggacaataatttctgggttaagtacaagatgggtattctgaaccaaaagaatccggccaaaagtgtgtggaaggagtcatctatatgtaccaagacatggaataattccgttctacagtttatgaaggtgtctgacatgttggaggctgatgctgggtttcttgtgcgtgacacagttgtgtttgtgtgtgaaatattggattgttgtccttggtttgagttttcagacctagaggttagtttatactttatttattcaataacaagataataaaaactcttcaattgtgtatatattttctgcatcgtggagtttttcctttctttcttgcacacttggaaaccttttatgttattgaaatcttacattatggattctacgtttcttctattcgtctgccaggtactggcttcagatgatgaccaagatgccttaaccactgatcctgatgaaattattgattctgaggaaagtgagggcataagcggagatgaggaagacacatttcgagattttctttcccgagctggattccatctcacgtttggggagaatccttcacaaccacaagttactctccgtgagaagcttctaatggatgcgggtgcaattgctgggtttcttactggcttgcgtgtatatcttgatgacccaactaaagtaaagcgtttacttcttccgactaaaatatcttgtaatgatagaagcaagctaataaagagtgatgaatcttcccctagcctaatgaatttgctgatgggtgttaaagttctacagcaagccattattgatttacttctagatattatggttgagtgttgccaaccttcagaggaaggctctcactctgagccgtctttattatccccaaagacagatggttgcgtggctgcaacttcatcggagtcaacaagggaacgaggagcagcagaaccttcgcaacatcttgttgacgaaagatttaaatctgatacagatgctaccctcagtacctcagctgtaccaagctcagagatgaatgggatcgatttgcttgagaaagcccttgcaatagagcctatgtctcctcctaccacatctgctgggcaatcttctgatgcttcagtccaatcaaaggtggggctctcatactgcttaaatctatctaccagcgttttgttttgctccgttgtttttctgaccatctggttaaatttttggtctttagacaaaatggccggaacagtctgaggagctattgggactgattgtgaattcacttaaaacccttgatgcggctgttccacaaggttgtccagagcctagacgacgaccacactctgctcaaaagattgctcttgttttagacagagcacccaaacatttgcaaccagatttagttagtctggttcccaaattggttgagcattcagagcacccactggctgctttagcacttatagaacggcttcaaaagcctgaagctgaaccagcgttgcgtgaaccagtaagtaatctctctatagcgtttccttcccttgttgtactttgttttgtgtgttggaggcttagaattcatgagagagtgtaaggtcatatcatgaccagaagtttaaacattcccttcatctggcgtttttctgtggcacaggtatacaatgctcttagccagttagaatgcgacagtgaagtgtgggaggacattctatctcagtcttttgagcttttgagcgacttaaatgaggaatctcttgtggcggccattcatttcacatttaagactgcctcccagtgccaacacctacctgaagccgtaagcattcatgtctcaatttttattctttgtttagagttaatattttcgaaattacggctaacctaagattttccttatacaggtaaatgcagtccgtgaacggcttaaaagtctgggtgctgatgtgtctctttgtgtccttgactatttgagtaaaaccgtacacagttggcctggtattgccgaaatgatacttagggatatcaacactgacgacagtgtaggtgccaattttgcaacattaccctgcgggccttttctgattggtgaaaatgagactgcctccgaaatggcggatttgatggaagaacatatattctatgcaaataggcagttttttgatgtctacattctgctggaaatgttgtccatatcgtgcctagctgaagaggcatctcaaacatttgaaagagctgttgctcgtggagccattgttgctcaggctgttgccatggtccttgaaaaacaacgtgttcagagcccaaatctgaatgctacaagtggggatgcttctcttaagcatcaagatcctgtattggagggagaagccagtgagcaaccagccactggagggactgagttcaggataatccttaatcttgctgagacattaactcattctagagatcctcaagtgaggggatttgtgaaaatgctatacacaatattattcaagtggtttccggatcagccctttagggttcaaatactgaggagactcgtagacagattcaccagccctacgagtagcagccacgatttagacttagagttggagattctagctattctgatttttcaggagcaagaggttgcgagacctgttttagccatgctgaagaaggttgtggaacatgcaaatattgacagggcggccctgtggcaccaattgcgtgcaaacaaggaagaacttgtccggttgaaggaagaaaagaagatagagattcaatctatgacaaaggagaaatctagcatcacccaaaaattaagtgaatctgaggctgcaaatacccgtcttaaggtatgtgcttaccttcatataatctgctccaagagtgatgatgctgaaggttattggtgttctgtgatcatattgcttgctaatactgtgtatcaaatggcagtctgaaatgaaagctgaggcggaccggttttctcgagaaaagaaggatctggtagaacagtttagggatgtggagagtcagctggaatggatccgatcagaacgtcaagatgagatagataagctctcgtctgaaaagaaaactcttttggatcgccttcacgaagcagagacgcaacttgctttgcaaaaaacccgaaagcgtgatgaactcaaggtacagacttgaaataaaatatggagtaaatgtttgcagaaaatgaataacgatcagatctttatattacagttattgtgccttgtatcgtttactctattccatttgtccaaattgtattgctcacttaacaagtgatgccgttttctttgtgaatgatacagaaggtaggaaaagagaaaaatgctctaaccgagaagctaaaggtaacagaggcagctcggaaaagatttgaagaagagttgaaacggtatgccactgagaatgtaactcgggaggaattacgcaagtcacttgaggatcaaatcaggcaattgacacagacagtaggacagacaaaagaagagaaacgagagaaagaagatcagattgctcggtgtgaagcttacattgatggaatggaatccaaactccaagcttgccaggtttgataatataattttttcttttcttattctgcttttcttttagaagtttagaactcacttaaactcgtatgctgtgatttttttcaacagcaatacatccacacactagaatcctcgctccgagaggagatttcaagacatgcgcctctgtacggtgccaatttagagtctctatcgatgaaggaactggatacaatagctcgtatccatgaggaagggctaagacagatccatgcccttcaacaacgtaagggccatacattatcacacggtctccctcagggtcacacactttacccgactacaccgcctcagcttccaccaatggcaatcggtttgccacctcagcttatacctaatggttcaggggttcactcaaacggtcatatcaacggttcggtcaggccttggtttagtcaccacacctaaaaaaatacatcttttttttcataggaagactacacaaaagaatgatggtctcttgagtttgtgaggtaaatcaatcaatcgatcaacatcatcaatgtttaattttccatatatatttatttttctctgagattttccgaggggtttttggctgctagaaccattggggggtcaaagtagaagattaataaaaatagaggggatacagatgcacaaatttcattgtgaaagaaaaaaagaaatgttgtaaaaggctaaaaagctgttatgtcgaatggaactaacagttgcaaagagtaccttaatgcatcttctatttttggctcatgtctctcataattcgggtataagctacaagcttggtagggttgattctcaagaaattaggtgcagactaatatcttcttaattcgcagactagcatttcttgaaaattgcaaaaagaactaacacatttttatataagaaatcacttatttatcaataggtagatatatagaagggattttagtcacttctaccatatccttggaaaaaggtttactttgtaccacattcaataattgctttttgaaagtaccacatttagtggaattgtggtagttttgtgactattttaccatcagcaaatatacatgtttaagttagattagctagacaaaagtgatgatggtggaagaattgcatttgatgcatccattcaaattatgtttaaaataaatacaaagaaatataagaataattctcctcatggtcgtaagagtaccccaaaactgtaaaccgtagagaaggtttgcttaataaggggcaagagattgagtaagagttgagtggattttattgatcgttggactaatacaaagttattagttaacgttaatatagattcacatacactagctatacatgatcatcatgatcacaatcattagcttttttttcgtctattcaccacctcacaattttgtgatttgtttcacttgggtttaaatggggcttaatcataatgttaaaacaaaattgcctaataacattggagtggaatgttacatattagttatttatttgtttatcattttgttagaatatttttcggttttattgaaaataatatataagatatattttcttattattaaaaacatatattttcaaaatataatcttcgataaaattgtaataaatttttttaaaaagaaaaggattttttttttttttgtaaaagtatgtaaatggaatatatagttacccttagtatacataaaattgtcaaaaatggttaacgcaatacttctgaccaaaaaaagaaattgattcattacattgtatttctatttttatttagtaaatacattgtattctttttctcaggaacatacaatttttgaaggcaactatcacatgcatgtacacaatcttttttaaaaagcaatatatatcgtttagcaagaagttttataaccataaatgtatataaatactataaacaatgtagcagtaccgatcacaatataaaatacaagttttacaaacatttaataatgggtgagagcatacaaagagtgtgtgcgtctatcttaacggtgatggttgtgatgttatcacttcttgaagatactaaaggtaataatgattttgcaatggctccaatttcagagaatgggttgctaccaaatccaatggcttgtgtgaaagatgcaggaaaaattccagattgtgtagaggcaatgaaacaaggttatttaaaagatataacaaaagagtgttgctttattctacttagtcttcccgaagattgttttgggattctatttcctatgcgtttatactatcgtatcgtacttaaggttacatgcaaattattaggcattttttaatcacaattttttcaatcattagatatttcttttcatgtaacggtaatttattattaagatttataataaaatcatcgttcttttagtgatttattaattattacctaaatgattatactataagtaagaaataatatgtgttggctatactaactaaaaattggactagtgattgtgaggcccttagtgagtagattaacgagaaaatgatattttcatgcatatacaatttacaaagcgtgttttcctacttttacaaacacatatgatcaattcatacccaaactacacaaaattcaagttatatatcattctaatttattagtcaaccattacggttgctcagtctgctaacatgtatctcatgatgttgcttaaaacgacatcgttttgtttgttagagctgaaattttataaactgtatttggttgactaacattcattaattatgattctaaattatgttctaaatgtgagtttgggtataaaattcaaatatttgtgtaatttcgatatgaattatcttaagtgtttgtacatataaaaaaaaaacacattttacaaattatacatgtaagaaaatacactttacaaattacacaggtatgaaaattatacacttaatatagaacaacaacaattttggggtgaaaatgtagactgtctaagtgcaaattggatcgcattttagcaaacgaaactaagtatatagaattgtagattccggtttagagacgaaaaaaaaaaaatccggtttagaacatcgaccaaatagggttaagttaactgaacttttcagggtaaaaaaagtaaaataaaataaaattaaaccagtaccttctcagttatccagaaggttttgatttggttttccttaacatccttcgtcgccggaatttgacgactaatatcagacttcatcagcttacgtcgatctacgtacgacggctatgacgatgacgtcgatcatcagatccagtcctactctcgctttcatcgtcttacagatttgcttcatcttctttgcttccactttcccttgctcttctgggtaagtaaatcgttctctgtctttgatttctctgctaaatcatctcaattatctagtcgatgcaatttcctgcgaatttcttctgttgataatttgtctcaatttgatgatttagttgcttgccgagttcagtactttgattttttggagatccgagaatttatttctctttgtgtggtttattgtgcaggtctgaggatagttacaccattactggtagagtcaagattccaccaagtaggttttaacttttcccttcttctctctttgggatcttcccaaagattactttacctttacggttccaacaatcagttcctaatctaaaaagtgatgtgtagtctgttttgatgttttgaatgatgaaatttgactgcttcatgtttattctgaatgttaaactctgttgaactgatctacaagttatttcgtaggcaacgtgattggtcacatagcaaagttctcaaatgtcaaagttatactcaatggtggacagaagattacgtttctcaggcctgatggatactttactttgtatccttttgatccttctgttattaaagtttcttttgagtatattattactcacagtagctgatgattggtttcttacttgcctttgatatatgccaaaagaaatcatgttcagtattggcttgttataaatgttgctagaaatagatcaggagaactaaatacctttatggtttcatgaaaagaagagtagtggagatgattcttactttttgcggtccttgactaattggtttgtaaagtcatgaagtgcctgctgggactcatttgattgaagtatcagcaatgggttacttcttttctccggtaagtttttatgtgttgctattaatggtttccaaaactgcagttttgtaagaatgtgttgctcatgcaatgatggataaccaaattcttaggtacgagtagatgttagtgctcggcatcgtggcaaggttcaagcaacactaacagaaaccaggaggagtcttactgagctggttttggagccattgaaggaagagcaatattatgaggtgagacttcacatgactcttttcattatttgttttgcatgtgcttctacacatctgtttttttctttctttaatctgatttggtcatgtaaaatactacagattcgagagcctttcaacattatgtcgatcgtgaaaagtccaatgggtctcatggtgggattcatggtcgttgttgtgttcctaatgcccaaattaatggaaaacataggtacgcttctattaccctcgaaatgtaggagttcactatgagccaacagattcatcttccgtgttttacttgtaaacaattcgactatggatttgatggacatttgatgttccttatcacatttcaccaatctaggagcttttagagctcttgaactggttggtggattgcaagttaagaagagttagtcatcgtttgctgatgaacacacctaaaatgttttcgtaaacagatccagaggagatgaagcaagcacaagaggaaatgaggagacaaggcgtgccttcgctcacaagcttgttaccaggcgctggggctagccgctaagagttcctcggttaactcaatgtatcacaaaaggaatgaagagagatttctcagtgatctgagtgagtttggttgttcatctgcaagtgatgatttattaaagttctccttttgagtatctgatatgtatagtcaacttgtttctaaaaccagaaatggtcatcttattgtttgtcctcgacgtcaacttgtgcttatgatatgtaacattattttatttttttattttggctttgaaatattaaacttgggaacaaggagagctcgtttggtatctttctaatcgggtgtaacatcatgtttcatctatatagaaaaagttttatacattctcacttttaacattttgatactattataaatattttggatgatttcattttttcatcataactcttcattcgttttacttataactattttgcatccttctatttattaattggaggattgtgtctcttaatcattactttttgtattgtattcgcataatctttcattacaaatgggttgcattacttgagttttgtccatttatcataattcttcatgatacatataataacaatagaacctcttattttataaaaaatcatgtcttgtacattttttcacctctatgcaaattttaatatcagttgctcgtggataaatcctcataggtagatgtgtcgaacggccggcccgctttaatctggatcggcctgcaataggcatctgtttttgtaagattgcaacgggctggcccgctaagattacgattgacgaatttaatgcatttattgtattcttaaatatgtaaaaatgtttgaggaatagacaatttaatacattctttcttataaaaataaaaatccgaataaatgtgttttgcagttctgaacatttgtgtcttgttatcgcaactttacattaattttttttttaaactaaaaatattatttttcttgttatttttttagaacgttgcaatccgaataaatgtcttctacagttgcatctttttatcttagctcttcataaatgattgaaagtatttagttaaatcattgcaacaatttttttattttacgaacaattgtaatttttggtttgttttatataatgttataaaagtatattattttaaacaaaaacagtattttacggtagtatttttttttaagttgcagtaacaataaatgtcctctatggtttcgtcttttaatcgtaacttttcataaacggctgaaatttttagttgaaccattgcaacactaggtttattcacaaacatatgcaactttattatatgatgagaaaaaaagaaatgatcgagcaggatcaataagataaagtcctaattcaaatgagcatgaaaagaaaatggaaaggtgttgtagtgatagactcacatgagggaagatacgggaagactttaaggtaaggtcaaagtcttatttaggatacgtacatatatattgctagaattgatttcgttaaaaattacataaatagaggttggtttcagagataatctgttaatagttcatgtaatttgaaaaatcattaacaattttagaactcatgattattcaatctgttttaagatttcacatgagcctaaaactccatcaaggcatgaatcttcggagttcaagaggcttatttgtaaaaacgtcaataacgtttggccattatctcaattatctcaaacttttctaatctacttgttggagtacgaggatgaagttaaatctacgtggggttagggtatcccattatctcaaacttttctgtaagttcaatacatgtgatataaatgtgatgcatttaatataatatagcaactgattattcacaagatcagatctctataaaaagctttaaaaaaaacttatagaaaagtttgcaggtcgttcaagacataagagaggcaaaacatcttacttgcaggcacaaagctttaatttctatagatctaatggaagggaagctttaacccgtcacatgaaaagcctagatctattcttagaatttaaaaacattcatgaatgtgatcatacaaactattcgaagatgcatattctttttttggacaaaattcaaagatacacataagagttatatagcatataaaattcgacttcatatgtttgatctatatttttctacaagttaagggtaaacttacaaaaaaatattattttgattttttttttctttgtagaaaactcttttaatgactgccgggtattcttaactatagattttcttaaaaggattgaagtttttgaccaaacaaatgatttccttttaaaatttatattttttgagtcaaagatttaacttttcagtcaaatatttatgaaagtatttatggctatgaaaaatttaaaattatatatatagatcatttcatactcgattaatggacatcaaattatatcttagaaaacatacaatattggtttgtaaaaatgggttcctccaaattgatggttacatgcattgtcgttgctatgctgaccatttcgtgtgacattctctctggtataggttattattgatatatatacatattttactataagataacgaattttttatccttcttgaaaagaagattcatattttttttctttcatgattgatagttgaaatgggaattagcgtacaagctttacctccgacttgtggaccagattgtactggaagattcatgaatcaagactgctctaaatattgtgcagctttatcttataaacatggtgtttgcattctattccgaggacttcctccaagaacttctacattacgttgttgttgtgggtaaatgaaataataattattcatgctcttcataatgtacggttaagtttttttttcctttaactataatacagattttatttttcaatgggaagaccatacataaaatccatacttattaaaatggcttagtcaacttaaaggtttcgtttggccaacctagcttgggctatacagtattacaaccagaccaaaacctaaccctctggtctaaccagcgagtctctttatagatagagatattaaaaaaaacaaattggcagaaattaaattccccctatgtctatgatcagtttatgaacttggccatagtaaccgatctcggaagcaaatccaacacagagaaaccgaagaagaagaagtacaaatacagagtcaaatgctccttcttcatttcgattctcttccagtttttgccctcagattttgaatcttctcttctctcactcttctatctcgtggattgagatggagagcttacccacgacggttccctccaaatcagaacgacgagctcgttcctccaagttttctcagagttcctctaagccttcggttataatggctttcttctcttgcgtcgcttggctctacgtcgctggcaggtacctttgcttcgtttttccccattgataatcgaatctccaatgactctagattagttcttagaattcgattttcaaatattctggtgtcgtaattgaacatttttcttgtgattaggttatggcaagatgcagagaatagagtggtactcaataatatacttaagaagagttatgatcaggtttgggccatttcttttgctctactgaaatgttgtttgtttcttaattccttatcaattgataatgttcttggagggtgtagaagcctaaggttcttacggtggatgacaagcttatggtcctaggatgcaagtaagttggttttggttgattgtgtaagatgcattgtggtttatgttgtgtgcttgtaataatagattatgtactcgttgtttattagagatcttgagaggagaattgttgaaactgaaatggagttgactctggctaagagtcaaggctatcttaagaacttaaaaagtggttcgtcttcagggaagaaattacttgctgtgattggagtgtattcaggctttggtagtcatctgaggcgtaatacatttcgagggtcttatatgccacaaggtagatcatgctgtgattgaccattgaaaccgtttttttttcaatgttagcatttggtatggttactaactttttgttctaaaggtgatgctttgaggaaacttgaggaaagaggaattgtcatacgttttgtgattggtcgaaggtttgtccactaattttatctttgtttgtttatacgtatcaagcttttcatcttttcgtgctcgttatcaccctatggactatagtacttatgttcttgtttcaagaattccagtccaaatcgaggtgatagcttagatcgaaaaatcgacgaggaaaatcaagcaagaaaagattttttgattcttgtaagtaaacaatatcaaaagctttagcatcctttagtagcctgcttgatatttgcttcttctacttagttttgcacacacagttttcctcattgatgtaccttctaatatcttctggcactactgctttttcaggagaatcatgaggaggcccaagaagagctagccaagaaagtgaagttcttctttagtgctgctgttcaaaactgggatgcagagttttacatcaaagttgatgacaatattgacttagatcttggtaaagacttcctcttttatttcctatctgtaaagttatgtttggtcctaccctgcatcagcaatttatgttaaattatcttgggttcaatctcacatcaccaattctatttgtgtgattcaaactgatagaggggttgattggccttcttgaaagtcggcgtggtcaagatgctgcttacattgggtgtatgaagtctggtgaagtggttgctgaagagttcgtatcatactcaactttcataaatttgtgtctttgacagtatagcaaactaatatatttccatctacatgggtctttgtgtttcaggggagggaaatggtatgagccagaatggtggaaatttggggacgaaaaatcgtaagtgatagcaaatgttatatacttaaaaggaacttcggtgaaataaaaatcttcttcgatattaagctcagtggttgaaacttatgtttacttcacatgattggaacctttaaacagttatgctgtaactcatagtatttcttcattatatttaggtacttccgtcatgcagctggttcgctgttaatactatccaaaactttggctcagtatgtaaacataaacaggttaggctcacgttcttactaatttggcagaagttaatatagaaaagtatgtcatcggcatttccatgtctggttaacactcatcacatattctcttgtctggtatatataattgcagtggatcattgaagacatatgcatttgatgatacctctataggatcttggatgattggtgttcaggcaacttatatagacgacaatcgcctttgctgcagcagcatcagacaaggtttataatcttcaatacgaattgactaaatatatgtatctatttgaatctgagtattattgtttacttttacagacaaggtgtgttctgtggcttgagcaaagcagtctcttccaacaaaacactcgtatattcatagcgcttctgaggcaggttcttggactgttaagattttagaatcagtttatcagtagccaattacgtataatatagggcatactcatgaagtttagtcagcctagctgtgaaaaaacaaaacttccaagttattattgaccaaatatagtaagttattactgaccaaattcagtcccggcttcgaactataagttttgagtgatggagtaatttacttggaacttttaatgataaatactcaatactttttcttactctctggtttcgtcgcttctgattattgccaaactcacggcagtcttgtgattacatataaatatataatgattgaggtctttggccggagatagcggttcgcacctcaaaccactgccaactctaagctaagtgcctcagtgcctgagcttttctctctgagtaggccaaaagtatattataaaaaatcttgataacaatggtcaacaatggcaacaaagaaagtttctcatgtatgtctacgtcgaagacctcttcttagttatactcggtcagactttataattttcctacgctgcttctctctaaacatcacgtataaaatatgaattgatataaatacacatatgcatgcgtagaaactttgtaacctactccaacaacacaaattaagatcgaaataaaatgaagggaagcttgtggttgattgctttgtttttggttctctctttcgcgatttcatcttgtgcatcttcaacttggccataccaaatccgcaaactttgtaagtagaaacaatatatatatatatatatatatatatatatatatatttttttttttctttttgtaggactaattaacgtcgatttatccaacagtggaaataagaacaccgccaagtggttcaagaccagcaccccaatttcattagctagcggcaaagaggagctttagagtttccgtcgtctatgtatatgggtcgtggtggttgaatgcaccgatttgtacatgatgttaattattttatagtttatggaagaaacataaaccagggaataatgaacaaaaaaatgtattttaattaatagattcctacataaatgagccacgaataaaactattagaagttatagatttttacgttacaaagataattagattcatatatgcatgggatcatgatttttgaaataatttcagttatgggaaagaaagatgcacgtatatcttctaaaatttgtgtgtattagtttctaaaatcttgcaacgaacatataaaaaaaaaaattgaaacttctaattttatataagcaattccaattttttaaaatggccgtttctgtaagagaagacgccaatattattaccaaaagtaccaacaaaatataagagataaaacttttaattgaatatttgttttccatagcaaagttttataagtatgaaaagttaaaagagtaatacaaaacaaaaaataataattaaattggacgattaattattgaggatttggaggattttgggttgcaacaacatgttaatccttgacaataacccccagtaaaccccatgctaatgcagagtgtgtcacagtctggttcaattccagcatggcacactcctggacaaatatctcttacctctggttttactcctgtaaatattttatgtttatcataaaccaaaaaccaagcatatatagttatcataagtgtgaagtgattaacatgtgtaataaatagttatccgtaaaagtgagcaagaaagaataattttttttttgtgggaagaaaaagaatcaaagaacattcattatgttcttccaaacttttaactttgaataattgtatatcatatcctgataactatatgcatttaataatattttgtatcattgactcacctgtgatcaagaacattgcaatgatagaaagtgcaatgaaaatgtatgaagatctttgaacatccatttcttgtttcaaaaatattatttgagtggtattactaatatcttgtgaatctttttagtttgaatgtttttggagtagttcaagagatttaaactccttatataagcaaatactaaaatataaaagtcatgtatatttacaaaaattcatattcaaatctaccaaatttgttggaaaatatattagaatgtgattgtattttggcaacaaattgaatgagtatactatataaatctttgaatacactaaagaaaatgcttcaaaggtgatatatatttgagaatcattgaataataaaataactataaaagatgaaatattacttgaataatctttgactgtatatatttgaaaatatgtacaaccacccaaattgataaagaataatttgatatccaattgtagatcatattaattattttaattattatatttctaatttcatttgtgtttgatccaatgtttatgaatgaatcatcacactattcatgtaaacgcatatgttatgactcaaaatcttaagaacaaaatatattatttaacctctaaaagtctcatataggtgttacaaagatgaatggtgctctagaaacgtaataaaaaaaataacaaaccgtaaaaataggaaacatgacataatagacgtccaaatgtttttcttaaaaacttcggtttaattcgggtttttaattcaactttatatttatatcaaataaaagaaatattttaacttcaataaaaaaacatgataaaaataatttgatactaaaaacagtttaacttaatcaaaagttacaagaatataactggatttatgagttaaaatattaaatattaacttgatcaaatgtaaaaaaatattttacttgaccaaaaagttaaaatatgaaaattgtgactaaacgttatgaaacacaaaaggtggataaaattggaaagttaaaacaggttcgcaaaggctatgatctcttcgttaatcttaaaatcactcatagtgtacatgttatgatacgattaagaattccaaaacacaaatttatgaactgtctcaaaatttactttagagaagagaacagatgaatgagattggttcgctctcaaaacttttagaatgatatgtgagaatgagacattgagaagtctcgctattttcttcactaaaacgcaaaaatgttgagagttactaaaaggaaaataagtttttgacttttctgaataaaaattgtcggtaatattgttatacacacttctttcttccttctaattatattcgtggattagagatcactcaatcccaaaaacaaaaaacacacatttctctctctctctctcgcgatcaaaattgttaaacaatctcttagaagaaattcaaattctctctgtttcaattgcgattcaaatttcaaaaactgacaatggggaaaccaacggggaagaagaagaataataattataccgagatgccaccgacggaatcttccaccaccggcggaggtaagaccggcaaaagcttcgatcgatcagcaaccaaatcattcgacgacgacatgacgatcttcataaatcgagcattggagctaaaagaagaaggcaacaaattattccagaaacgcgattacgaaggagcaatgtttaggtatgataaagccgttaagctattacctagagatcatggagatgtagcttatttgagaacaagtatggcttcttgttacatgcaaatgggattaggagaatatcctaatgcgattaacgaatgtaatttggctttagaagcttctcctaggtttagtaaagctttgttgaaacgagctcgttgttacgaggctttgaataaactggatttcgcgtttcgtgattctcgcgttgttttgaatatggagcctgagaatgtttctgctaatgagatttttgagagggtgaagaaggttttggttggtaaagggattgatgttgatgagatggagaagaatctggttaatgttcagcctgttggtgctgcgaggttgaggaagattgttaaggagaggttaaggaagaagaagaagaagtcgatgacgatgacgaatggtggaaatgatggtgagaggaagagtgttgaagcggttgttgaggatgccaaggttgataatggagaggaagttgatagcgggaggaaaggtaaggcaattgaagagaagaagctagaggataaggttgctgttatggacaaagaggtcattgcttcagagattaaggaagacgcaacagtgactaggacagtgaagttggttcatggagatgatatacggtgggcacaattgccgttggattctagtgttgtacttgttagagatgtgattaaggatcggtttcctgctctgaagggttttctgatcaaatatagagactcagagggtgatttggttaccattactacgacggatgagctgaggctggctgcgtctacgagggagaaacttggctcttttagattgtatatagctgaagttagtcccaatcaagaaccaacttatgatgtcattgataatgatgaatcaactgataagtttgccaagggatcgagtagtgttgctgataatggaagcgtcggagactttgtggaatctgagaaagcatctaccagccttgagcactggattttccagtttgcgcaactgtttaagaaccatgttgggtttgattctgattcttacttggaacttcataaccttgggatgaaactgtatacagaagcaatggaagatattgtcactggcgaagatgcgcaagaactctttgatattgctgctgataagtttcaagaaatggctgcacttgcaatgtttaactgggggaatgttcatatgtccaaggcaagaaggcagatctattttcccgaggatggttcaagggaaactatactagagaaagttgaggccggatttgagtgggcgaagaacgagtacaacaaagctgcagaaaagtacgaaggcgcggttaaaattaaatctgatttctatgaagctcttctagcactaggccaacaacagtttgagcaggctaagctttgctggtatcatgcattgagtggcgaggtagatatagaaagcgatgcttctcaggatgttctaaagctctataacaaagctgaggagagcatggaaaagggtatgcaaatatgggaagagatggaagaacgccgtctaaatggaatctccaatttcgataaacataaggaactgctacagaagttaggcttggatggaatctttagtgaagcgtctgatgaagaaagcgcagagcaaacagctaatatgagttcccagattaatcttctgtggggttccttactgtatgaacggtccatcgtggagtataaacttggcctaccgacatgggatgaatgtttggaggttgcagtggagaaatttgaactagctggagcttctgcaaccgatattgctgtaatggtaaagaaccactgctcaagtgacaatgcacttgaaggtaattacgtttatctataaaaactataatctagcgaaattacctgcaaatattggcagtgaatataacaatcaaacaataactgtaggtatgggattcaagatcgatgagatagtacaggcatggaatgagatgtatgatgccaaaagatggcagattggtgtcccatctttccggctagaacctttgttccgaagacggtcaccgaaacttcatgatattttggagaatgtgttttcagggcctcagtgacgaaacagtcatcatatcagccggcatcagttttcagtttttataaaggtttgtctgaaaattcggagtttttcaggttggtgtttgatgaaaaactaatctcttgatctgttccagcaattgttattacaggtatagtattcactattcattgggagttatacgcaagttttcttcgatttttggtttggttctcagcttatggaagcattgaagcaatattttttttaatctcttggcgggtattgctgtgaagaagatgagcgtgatgttattttttttgtgcagatgggttcaacatatttgttaattcattatttcatttttggtgggtttgtaattatatcatagttttgtatttttttttttttttttggacaaaagttttttaacttttttattcatcgattttttggattagtctttgtatctatggattggattggttattaattaataagatggtgaatgtttttggcttgtggcactcagaactgttaaccatcctacaattagaaacgacgtgctgtttctattcttgaagtagaatggcaagttgttaacaggcatggtagattggtagtgtagggtgagctacgatagactcgatgacgttgattccaaagaatagccgttcgttcttgaaaatcgttgattcacgaagaataaccgataacaaggaagatacgaggatagaaaacgatgctcaaaagaagaactcaaagctctatattaattcaataatcaaaagctgtcctacaatagagcatagcggctaacttaaatagaagacacaaaacataaaatcctagcctaacgtcagtgccaaagctcaataaacaatagaaaatcaacatgaaaataaagcccaaaaccataataaagtaaccaaggatctacactacaccacatgggcatatttaaccagcatagaaccgaacagaaccaaaatttgggatttggttcggtttcgggtatttatttcataagaactgaatggttccaatttgtagaacctaatggtttttgatttggttcgtgtaaaacccacagttctttagttcggttcagattctagtggtttgatcatattattatggttttgtatgggtattttggttaaatcgggtagtttggttactcttggttacacaacaaccaatcgaaaccgaaaccttttcgagtcttatttgcttcaaatttgaataatccatatggaaccgaatattaatcggttccaaatagatttaccaaatttacataccagaattacctgaaaaccgaaagaaccgatccaaacgaaaaaccgaagcccaggtacttgttgtcatgcgtatctgtaaagagtgtagtaaggaaaaacagcacgaatgtttataggaaaaaataaacacggcacacagttttgcactgagtttcttccccgagttggcgaagaaacccagagaagtaacacaacacagaagtagaatcttctttagtcatctcccgcaagtttaggaaagctctgaaattagggtttttcgtctgcgatcacgatccttcaattactttgcgataatggagaagataagacaaccaacacatgcaggctcttggtataccgataatcgtgagttctgatttttacttgcatgctcaatcatcttaatttgggctgaagattaggttttaggtttcataatactgatttcatattcttattccttttgttcttcatttgttgatcattgattttagtttaactgcttaaaggttaaagttttgatattgtgattacttaaattcgttttgctaaattgggtttaatttgatctgatgtttagtatctggatttagggtttgataactctagaaaatttcagtgactttgtttttagaaacaaatacatttagcagtgaggtttgacttttttttggtttttagaatctcaagcctgttttatgtttctttgtcagctacaaaattgtcatctgatcttgaagaatggcttaatgcaactggtttgaccaaatctcctgatgtacgaggcgtcattgcaccgtaagctgttcttgcttatctcatttcctcggagaagtgattacacttgcactaactttttgaaggaatccagacacgcaggttattcgtactccggtcgtgcagctgcttatgcttttgcaaacatagatcctactaacatgtaagtaagctcgcctatattttggaagagtgtcatgagtagaccattactatttctgactagtctcatttcagttcacggatatttcttcttggtccatctcaccacttttatactccaaaatgtgccctttcgactgcaacagtttataaaacccccattggaaatctacctgttgatgtggagagtaagtttgtctagcttagcttaacttatcaaagaaagattttctttcagttggtgaggaaagatgttctcttctggttttcatatgaattcaccagtgattaaggagatacgagctatgggaaaatttggaatgatggatctacgggtcgatgaggctgagcacagcatggaaatgcacttaccgtatttggccaaagtatttgaagggtaatcacaggggtagtagtgatgttaaggttctgaataactatgaatgacatggcggaatttgctgagactggctccattttaatattttgatcaggaacaatgtgaaagttgtacccatcttggttggagcagtaagtccagagaatgaagccatgtacggtgaattgcttgctaaatatgtggacgatcccaagaactttttctcagtgtcctctgacttttgccactggggctcaaggtttgtcttagctcttcatctcctttctctcattgaagtaccacattctgatgtaacgttacttttgatggacattgcttgagaaatgatatctttttctctttatctctttctaaaattcgccttaactgcataaccagattttctgaggcccttccagtgagctaattgcgctctgttatgtttatattcatatgtttttggttataggtttaattacatgcattatgacaacactcatggtgctatacacaaatcgattgaggctctagacaagaagggaatggatataatagagacaggagatcctgatgcctttaagaagtatcttctggaatttgaaaacacgatttgtgggcgccacccgatcagtatttttctccatgtaagtagtgctagactgtttctttgcattggtcaataacttcatgaaaaaatagccttaagcttgctgccttcttatttagtatctagatacttttcttttagatgcaaccaatataatggtgaatctggtactcaccgaggctactttgcatgtatctggtttgtagatattcctcacaacttactacttctgttttatgtttgtgattgctttcagatgctaaaacattcatcaagcaagattaagatcaatttcctgcggtacgagcagtcaagccaatgccagacaatgcgagacagcagtgtcagctatgcatctgctgcagccaagttggaaacatgaactaaagatagtcaaaaacttggtgtgcaaaatttcccatttggtttcaaggtctttcagggtcgaaaagtataatcttaatgcatatatctatgcgaagaaccttagaaaaccaaaggtttcgtgtttacatttcactgtaataacaagtacaagactctccttcattgactggtatctaaattttcatttttctcagtggactatgttcagacatgaaagcacaaatcaagtatcttgagacttgaaacattttgcttaagatctacagagacatacatcaaaagttaactcttacaatctccttactttcagaaaattcaggcagagcttccttccgatgccttcgctctctactgtaaatgatccagaacataagtgagagcatcacagccgttgctaaaatggccagacccacatagacccaatagccataacgctgtagtccaggacaatggtcattcgttatgtctctaaaggtctgttttgcgtatgaacagtcctgaagctggaccaggaatggcgcgtctctgatcaatcccgtgctgatattaacacctgatgccatctgactgtacagcgcaggtgtaagccttcctgttgtggtgcaagtcccgttctggctcacttggcacacgaaactggtccatgcctgagagtgttttgacatcactaagatttctttgtacaagtgcaattttatgcctactagagacagtttcaacagtaaagaaattggtcagagggggacttacttcagtagcattgttcaaatcgagatcaccaggcgagcaagagcgatcggtaaggtcatggttaaaaggattgcagagcaatggaagcaacggtccagattggttataatacattgggacaaagactggagagaagttgatgttggagacattagtgatgactgtgttgattagctccacaagctgacccgtcacttctctgctacgcatcaaggtttcctgagctgtggcattgtctgtacaaggcaatatctcgtccagagccgtattgcttgatggtctctcaacccattcgctcattgccacacatgtgtctgcagttgcactgacggtgaaagaaacaaattcagttatgttttagctttaactaacaaagaacaagttgttcaagagtcatgagacatacttgtgtagcacaaggaatgttccactcaagatgaatgtaccagtcaccagaatccatcccaagatcacaaggctgcacaagaggaaaaggattcagataggttttacgaatgaaagtcgcgcagtgaacattttagagtttgactcacgtgtaaacgatgacctgcatcccgaaaatcgaagaaactgcacgagaagaaatgataacaagatcactagagtcaatacattagtagatagttgagaaacatgtagtcaaagatgaaaacattaccgagaccaagaaaagtcaccacaagcatgacgattgaaactacaataagcgctactctcctgcaagtacagaaatgactattatacatttattttccaaaatccaaagattctgtaacagatagactgttaggaggagtttgttacacagaatcaagaaaatgtcttatgtgattggagctattagtcgatttctcagtgatagtagctacagaagaatccagtttcactccgatctgatcgatttcagtttgtacatttgcaggtaaaagaacctgaagaactgcagcctgcttggctgaagcaagataatctgagatagctctaagctgcgaaatcgtgctatctgcttgactcatgacatactctaatgtctctgtcgtgcttttattataccttatctgacccgagtatagcagaacacatccgattctacataataagaactcaaaatgctaagcagtgaaaacaacaaagccaaatcataacttgtaatattttctcttaactcacattgcaataacagtgaagatgaggaggaagatgagggagacaacataagcaactttagagtatccaacagaattggttctatggcaaatgtgacacatacagatgactaataaacagatgccaaacccaagaaaccaaacagcagcaagaacaaagagaggaacagctgtatagctcactgactgcaatatcaaaacacataatcaacaaatcacagcaacacacaaagaaaaaacaacaatctaattgaagtggagagaatcttacagcccagtaatgttggttgctgatattccatcctccagtatatttctcaaaaccattgagaggatcttttctatatgttctttgagcagctaaagctactgaagcaacttcaattacttgagggttgttgaaacctgcaggtcctaataatggtgcctctgctactataaatttcattacagaaccggttttctccgaagaagctgaaaagagacgaatcagattgaaattcaagaaacaaaaaaattgtagtaaagactgaaactttttttctgttatctcaaaccctagaaattgcatatagatgatgttcaagagtcatcaagttctagaagctactgagaaaattcagattatagacaacccccattgtgaaattagtcgaaaatctgtaaagaattaagcaaagttttgaactttttgagcattttcatggaaacaagaaacagagaatgtagaagaagagagaaagatttttttttcttttttggtaaaaaagagagaaagttttatcaagaaagaacctaagagaggaaacacaaacctgcgggaggctgagtaggagaaatgtgaatagtggaagctccatgagaatgagaaatagaaagagaggtaaagaagcaacagaagagaagaagaagagacattactactactactacagtgacgcaatcttgagtgaaagtgagaaagagttgcagtggagagagagagagagaaggaggacaataaacttaaatgtgtctttttagaaaatctatgacccacaaaagactttttgcagtttttctgtaatgagtttagactttgatgatacacacaaaaccaggttttctcttacaatttctgaagtgaattattggacaatggaatctttgtagatttcacttttaccgcgtgagttaattaattgttattgttctaaactttaaatattagtacagttatgatttaggaaatttacatgtttgttttaatcacacaaagaaaataattgaacttttaatgttttacggtattaacatatgttattattaactttttaggtaattatagttatgcaatggaacagatacaagaaagaagacaaacaaaattgaaaagaaaaacaaggataaaataaaaatattaatgtacagcagattctcctatatagacatttatgtgttttttttcaggtttaggacacgtaatccttttatgtgtgatattagaatagatgtattttataacataaatgtataagaaaattattagattatgtgtattagaaatttagatttgttgtcttaaatgtgtatatattatctaactagattaaagtatatgtagtggtaaataagggttacattttttgtttcaaaaaaatgtctaaaaatagaaacaaataataattcactcaatattatatttatataatatggttatatctctcatacaactaaaataaattttaatgaattttagtttgttagattcagttcagtttggttatataaaaactgttttagttatttatttattttgtattttaagattatgaaaccaaaaatttttattagaaattttgtgtaagttctatatgtcagttttgttctgtagtgggtgagtaaaataaccgaaaaccgaaccaaaccaaaccgaaataaattgtttggtttatttatggtttagcaaatcatatgctcaatcattttcatgttcattgaggtagcagcaacttcctggttaaaccaaaacaatgaagatcaatttgaagatcacaagtggaaaccgagtacaatgtaagtcgatactattaacttggtatagaaactaaagaaatattaaactgaaaagacatgtgcattgcgtttaactaagcatgccaccttattttgatgcgtgagacaattgttgtactagtcttaaatactcgattgatatgagttatctactaaattcacaacttttgattaatcttacaagtggcttgtatcacataagccatgaaagtaactaacaattaaatcaatacgagttacactaagcagaaaacattaatggagaacatctattcacaacagcttcctagagatttaaccatacattttgactcttgtaattttccttacaaacgatcaattacctctttaagaagtatgaaatgattattttttttataatccttgatttatcttcattgttaagatgagctttcttttccttgggcttttattacccaaaatccgatggtcggatccaacaccaaacatttggttcgtagtagccgaattagccatcttttgtccagaacccaaacccctttcgtgcttatgaaatattccccgacaagaacaaagtgagaaaacaaataaaaacaagtagaatcatattgaacaacaaaagcaatactattataacatcaaatcataggaaaactgaattgataactcatacatgtatagaaaatgaaacgaagaccagaacgttgtgggaccagccactttctgacaactactcctcatttcaaaataacacaataagcgacgacttttcatacaacttgaaactgtcttatgccttcttccttgtcacaaacatcaaaaatatataatatatacacattagcaaatgcatatgcacatgaatgaatttttgatacagaaaaagagagaaaatgggattccgtgggaagtacttcttcccaattctcatgactctatcgttatttctaataatcagatacaactacatagtctccgatgatcctcctctccggcaagaactccccggtcgccgatcagcttcttccggagatgacatcacatataccgtcaagactccgtcaaagaagacaaagagactgtttcacacggcggtgacagccacggattccgtgtacagcacgtggcagtgtcgggtcatgtattattggtacaacaggttcagggacgaacccgggtcggatatgggcgggtatacccggatcttgcattcgggtcgacccgatggactcatggatgagatccctactttcgttgctgaccctcttccctccggtgttgacaaggttctttatcttacttaattctttgttattggtgaaaggtgtattggttatagctagattttagaatcatcatgatgttatttttcgatttagaggtttattttataattgaaaatagtaacgtaaaaaaaaacaatctcaaatcttgtattatattattgattgacttgtcaaaataagtaatgcatgttcacgaaatcatgttgaggataaaacttcttctttatcaaaaaaaaattaaaacattatttttaataaacataagcatcttttatgaaattataagatttaaaacaaacatgaaaaaacctcgtaaaacaaatgataatatgtgtaaattttattccaaggatgatgaaattttcttaaagaaatatttacacaaaaaaaacatgtgatgatgaattgtatataatgtgcagggatatgttgttctaaataggccttgggcctttgttcaatggcttcaacaagcacatatagaggaagagtacgtatcgtttacattctcagtccttattttcataatactattttgatatctagaactcttactttgttttattaataccctatcgtatagttatagtttgtttgatttccaatccccatatttgggttggggaatgccatttttgattttcatatagtttcctatgtttcttgatcatcatgtcagttacattctcatggcggaacctgatcatatcatagttaaaccgataccaaacctagctagaggcaatctcgcggctgcgtttccctttttctacattgaaccaaagaaatatgaatcggttctccgcaaattcttccccaaagagaatggaccaatatcaagaatcgatcccatcgggaattctccagtgatcgtcactaaggtatagtaatcgcagcactagtttaagtccttgcccggacaacatatatggtaatatgactaatacttttcttggttttgtagaatgcattaatgaaaattgctccaacatggatgaatgtttctttggctatgaagaatgacccacaaacagataaagcttttggttgggtccttgaaatgtaaacttctctcctactctaatgtgaccccggccctctagttccagatatatagtgtttaattaattgatctatgtttgatttacactataaggtatgcatatgctgtttcttctgcgttacacggcgtgagcaacattctacacaaggacttcatgattcaggttttgattaataaaactttatttagtataccaacaagtttcaccaatttcggatcataacaactcatgttttatctattggtgtagcctccttgggacactgaaacaaagaagacgttcataatacattacacttacggctgtgatttcgacatgaaggtatgtcaatcatgaaacaacaagcaatataagaaagttaataaaagatactattagataagcatggttttatattgtctatattggttatataattcacaggggaagatgatggtagggaagattggagaatggagattcgataaacggtcttacggggataaaccacccccaagaaatctcacactgcctccccgaggtgttcccgagagcgtggtatatatatatagcttcaaacaaaacttctctcatttgtttccttttggttttcttgcacagtcctaatcactaagtgggtataacacaatgcaggtgacattggtgacaatgataaacgaagctactgctaatattcccaactgggaatcttgaaaagaaattctttttttcctaagcaagactctattcctttaatttaactctgtccgaagactgtagtcgtagaaaacatacgaagaaacgttacggttttctgtttcataatcaatcatacaacaaatttagagaaagaaaacaaaccttaaaatcgtctttcttgatttaccaaaacagaaaaagctgatgaaaatagatgttaatttaaccatggtcatccacacgtaacaagaagtatctaagagaagaagattcttataagtgttacaccatagaaatagcatagattattatcttattatataaagtagggtttacaaagttgctaactcacgtgatcgcgacaacattgatgagatgtcgatatgtgctaaactttgattatatacgaactattgtatgcataatgaaccaagatggctgcgaaggtagtgtggttaccgtggttcaccacctccaatgttgtaagaaggatagtgattgtaaagtgcagtttccagggggaggttactgcaaccaacaatgcgattgtgtgttatatggttaaagtatgattgcaacatcaaatgttcgaagtaagggtattgtcaatcgagcctggtccggtctgaagcccacaaaacccgtatgtatctgagcccggcccgtaaatattccgatcttttttttttgaaatcccgacgttatcaattttattttctcaaagtgtatttttcaatttctaagtacatataggtttaaatttataagtttaaactccatatacattaatgttattataaacgttcatatgttgtttgatatgaattaaatgaatgttatttttttctagttcttgtctacgctttgagatttttattttcccaatggtctacgatttagccgtgctttgttcccaactaatcaaattgcatcgataccacttacgttacaacttacaagccatttagatttattcaaaaagaacctagaaatagacaaagaactgcgaaaagcttattcacatatactacacattgatcctagctacaagcaaaactaagacttgtttaagaagattacttcttcgatcttccccttgaaaaaataagagaagaattcgaaaacgtttcataacgaagacactcttttcaatccccatgatcggagagaatgcgagatcggaccggtttaagacggatttggatgatcggagaaagaaatgaatcatgcgatatctaatcgcaggattttgatcagatcgttggttgcatcggtcggtttgaatccggcgacggttttattagcgaagaaagccggtaaagggacttcactcggcggcggagatgttgatgtgactggaccagcgtaaaacaaagccggcatggatttccgatttgaaattctgatcggagtcgaaattttcatcggatctgatccgatctgacgattagatttcagatctggtttttcaatcggtatcttaacgttgatatcttcgccacgcttcagaattcgtacatgattggtgtggttatgaggagacggaggaggatgagagatctgggattggtgacttgacggactccggcgacggcgattggtgatcggttttttatgacggagaggaggggacgtgtttgtggagaaatgattgattatagaatcatgaggatgaagaacagcgactcccatggtgatttctcagatctagagaagaaatgttaggaggataatgagagaactgggaaggagaagggtataattgtaaaaaaagggtcctttgagatggtggaagatgatgaagactgaagaggagagatttttatacaggattgtttgttagttggttaacgtgtctgcttcgatggcaaaatgtggtttgatttttttagccactctcactcgtaccagctgtagtatctcacgcgctttatttgttttctcttatttcgataaagaaaatgttgtctctcgttaaacgaaacgtatttcgataaatttatatttgaacgatttatatatagttctatactctatacaaacggaaaatttaacgctaaatataacacgaagtataataatttggacgaatggtacattgacctaaacagaaaatttcttggttcctctgtgttgccagagctgcctgtgttgccagagctcctataacttgaacttgcttaagaaaacggtgctggtcaacgattactagttacaacaaacgacgagtaaagggaaaacaaattccccactattaccaaaaagtagtcgcctttaattagggttgtggttttgttgactaattcattttgtattggttcccacgatacaatttttactttgacacctagctaagtggcgagcattactttattattgactagtaattttcagaatcttaaaacgaaatttctaattagtttatttaaaaccacattcatcatctctacctatttagaaacattcgtccagacttctttctttggtctcgaaaaacatggagttgggaaaatcgattgagaaccataacgacgttgtggtaagactaacgaagcatgtcatcgctaccgtcgccaatggctccaatcttgtcttctcaccgatatcaatcaacgttttgctcagcctcatcgcggcaggttcatgttcagtcaccaaagaacaaatcctctcattcctcatgttaccgtcaacggatcacctcaacctagtcttggctcagatcatcgacggcggcaccgagaaaagtgatttgcgcttgtctatagccaatggtgtttggatagacaagtttttctccttgaagctttcctttaaagaccttttggagaattcttacaaggcaacttgtagtcaagttgacttcgcaagcaaggtaacgttttttctttcttgatggacaaattttgaatttcttgaatttatataacatccaatttgtggaatgatttgtcaaattttatgattgcttatcatgaagccttctgaagtgattgatgaggtgaatacatgggctgaagtccacaccaatggactcatcaagcagattctttcacgcgattctatcgatactatccgtagcagcacactcgttcttgcaaatgctgtatatttcaaaggagcgtggagcagtaaatttgatgcaaacatgacaaaaaaaaacgattttcatcttcttgatggtacctcggtgaaagtcccctttatgaccaattacgaggaccagtacctaagaagctatgatggtttcaaagttttgcgcctcccttatatagaggatcaacgtcaattctccatgtacatttatctgcctaatgataaagaaggattagctcctctgcttgagaagataggctccgaaccaagtttcttcgataaccatattccgctccactgtatatcagttggtgcttttagaatcccaaagtttaaattctctttcgagtttaatgcttcagaagttctgaaagatatggggctgacttcaccatttaataatggaggtggtttaactgagatggttgattcaccttccaatggtgacgatctatacgtctcaagcattcttcataaagcttgtattgaagtggatgaagagggaaccgaagctgcagccgtctctgttggcgtcgtaagttgcacttcttttaggcggaatcccgatttcgtagctgaccgtccatttctgttcactgtcagagaagacaagagtggagtgattttgttcatgggtcaagttcttgatccttcaaaacattgattgaactgggatgtggaagaaaacattaagccaccatatgttatgttgttgtattttgtttatattcatggtttgatggaagtgggttcctctttctactgctttgtgtgtgaataataaaagtgattattgtcaaggatttgtggttatatttggtgtggacataatcatctatacttattggatcttgctgcaacagttacttgtaataatgctccctttcccactaactcgtatcttgtctcctcgtttttcaattgcgtaaaacgtcttacgagtttttcagtctcaaatctcatatgctttcactcgccgtcgtgaacttctatttgttgcttttacttatactaaagaaaacttgtaaagctacacaacttggcacaccattgttggatgtgatcaagttttcatcttgttttcttattttagaagagtcatatattgtatagttaagcaactgttttatgtatattcgtatcacacgcagaaagatatacgaatagaattgttaactggaaaatagttacacgttatatatatgtgtctctacattgtgttgtcttctagagacatgtcccttagtcaaagtgtgtcatgtaaacctataaatacagttaatatatctcataaaaatacgtggttttcgtttacaaaacagagaactagagagtaacacaatgttagagtaaaaacggtgttatccgacccttgacaactttgagagttgaaagttctaccaccatgaatgtccatttgaagaattgaacgtaatgcaactccaagatgatacctggtgaggacaacatccttgtagactagattagaaacggacattggaaaacaaactaacaaaggtgattctagattagaaacaaactagactactctgaaacgcaaacaaagagaaaccggagaaatatccggttaattgcacatatgcgctagaggaatacttagtaccatgaactgcacactgtaataaatcgcaaggaggcgagtggaagatacacaaatctcatcatccaaacaagggtgaatggaggagaagcttctaggtgaaaaggaggtggtagaaaaggaaagactataggtcatacaaaaagctaaaacagattgcaagaaatggtcaacttggagcctgagggggcgaatctgggggataaacggatctagaggttctgctggcttggtagttctcaccaaagttgtagagatcggacttcacaggaggtctggagacatgagcagctcaaacagagacggagaagaggaggttaaaagcaggagagttgacatcccaatagctacacaaaccatgcaaaaactagacagtatctactgggaaatgattggatgaccaacgaaaaggagctggagatgtttagaaggaggacctaatagaagagcattcatcttgaacaaacaagacggatatgcaaccacatttaaaaaagtgccccagataatttgaaatttaaattcagaatattttttcttgcttttatataattatggttgaattattgtttagaagtattttacattattttaaccaacactgaaatgattatagaaacaaaatgaaaccaaaatgacattaaatcaaacaaaaatcaaataatcaccaacttgttttaagtgaaccaaattatggatttgatgacttctaaacataaaattttttgtatgtatggaagattaagcttttttgacaaagtgatataatggtatctttagtggtaaaaataattaagattaatagaaacgtatgaatttagtattctatagaaaagtatagtagttattagttaatgtaatgttcttcactagaatttttttcttataaaagaatacaaaaatgctattttctgaaaataagaacattacttgatcaaaatgtttaacgagaaattagaatatttgtataattaaaatttttaatatggttggcattttctcatagattaatgttaacttatatgattttcctatggatggtgaattgagaactagctgagtttaacaattgagtaattgaattcaagtattcatgcactcaaatctaaatttattattaaaaaactatctttagtgctaaagaaaattttaaaaaaaacttatctaacagaaataaattcatgacatttatgacgcgtgttgtaatatgtcaaactttatcttttaaacacaaaggctcttataaatcattaatattccataattgtttattacaatctaagaatataaatgactattttatctttaagttgatattgtatagctcctcatctcagaatcttaaaattacaacaatgtctaaagtgtagtatgtttaattacatccaattatctaaacaattacaatgtgtacttttttttggttatgggccatggttttatatttaactcgcttataatatttataaaacataaataatgatttgttaaaattaatgacctgtaaaaatatttgataagtcaaagtctttgccactcaatttctataaaattcattaatacattttttacctttttaattgatttttacctttttgttttatttaattattttaacttttaagtacaagttttataacgactcacttcttatcatcttatctgagtatttttctttctacggttttgtataactttccgcccatctttagtttttaatatttgttttgcaaatttctgcacttgatctttatacatcttagattcataccgagatttcatccgttttccattttagaatcttcatttcaattcaagttcgtgtttaaatggaattctcattgatctccgatgaaaatttcatctttaacaacgcttatctatgttctgttaatgatgatacatctcatataccaaaaaataatcttacctttttcaatgacaatctaggtcaatcttcttgtactagatggtccttttcaccagatctgactgatatctctaatcagcactaccaccaaaatcttatacctttgatcccaaattacgattctcaaaatcagaatttggatactaatcaaaaccatttggtttacaactcttcctcatataaaattccatcaaactacccattaatgagtatcaaatcctactcaaatgttgatatctctgagcaatctatgaatagcatagccaacaacggaaaaatccatatgattgataaccccccaacttttgcataccctaaaggtatattcaaaaaaatttatgatttgcggggaaatactttaagagatgagattgtatacaatgaagagctgtctaataagggatatgagccaactcttgatcaggtaatgggtgaacctcaatcatttaatgtgccagtgccagaatatatcaaaaacacaaccaacgaaatcatgaatcaaagtgaagatgataagatgaaaaaaaattatcaaaagaagaatataaaggtggtgagcacaagcaaatatttgaagaaaagtgacatcgacaaagtaaactggacagaatctgaggacatgtaagtcttcatatttttttcattctcattaaaacttaaaactattattatatttcatccttgggaattcttatataattattttttattgtaaaccttttatttattttttgaggatgtgaaaatattttgtaatatatatagaaaattgaaagagataatggcgcttggacccaaaaacaaatggacaaaggtcgcaaaaaaattcgaaggaagaacaggaaaacaatgcagagagaggtggtataaccatgctcgtcctaacattaaggtgttcttttctttcatctccctacattcttattttcataatttaatatagatgatcatcacaacttatatgtgtgtatatataaatgttataaacaacaattgcattatcatgattttttgtttattattaatcatgtatatttttgtgtgaaagcaactaggtacttacaatgtgcacatgcatatgtataatgtatagattgcaattcatatagtttaatagtggtgtggctaacattttaatcacaacagtttcaaagggttattaaaacgtgcatctttttagtttgtatcttgcttctatcaataaaaatagtcatagacatacaataataagagcatgattaattatttatgtatatgtaaatgacataattacatataaataattaatatgtgatttcagaaaactgcttggagtgaagaagaagatcaaattttgattgaagcacacaaagtacttggtaccaaatgggtcgagatcgcacagcaacttccggggaggagcgataacaatattaagaaccattggaacaccacaaagcgtcgggtgcaaaataaaagaggtggaactgtcaaccctgtcggcaataacatccttgaaaactacataaggtgtatcacaatcaacaacgaagattttcttaagaccgatggatcttatggtgaaccgacaaacattgagagtgatgatgactctaaagatatgttatacggggagatgaatttgagtctagagactataacgacgcagaccaccaaaccattgaccaatgcttctacaacatcaccttatgttcagatgccagaagataattatactatggaggattgtgaatcactggaggacattctagagctgctgcgttggtgggaataatttccagtgaaggaaatttctttgatatatgatattttcttactatcgtgtaagataatatatctatctatctatctattttgttaaaagcgatttataatttacaccgttttggtgtatatttctatctatccttttacaagacctatatatgttatgttatggtggtgtactattttaagtgagcgacatagtattttcttcatatagctaattaatcaacaacaatttcccaacttacaactatttgcgtactttaaacttatattgaaagagaactacaaaattatttttttgtacaagagaattatggtcttcggatcaataatttctctagatataatatgtaaagccaaccctataatttgtaaaatccatgatttgatataattttcttttaaaattgtgaattggcagacaaaaacaacattacattttgatttaaattcataactttgacttgctaaggaaacaccatgattcattttttgtcatttgttacatcatcactagaaatatttgatctaactttattatgataatagactacatactacatatgcagttacgattttaaatactacatatttaagcgtgtttaaactgtaaccatatcatataaaatgacatatctaaaagtgattttcaatattttgatatgatatgtgttgtagcacggataatgatctaatttttaagtaataagcttgttcattacaaaagagaagaaagtagtattgggccatgattatgtaaggacaaaataggaagatgtggaagaagccattcgagggttttattacaaaaacagagtatataattggtcataatgttttattcacttaatttaacattattgcattatattttcatgaacacatatttctttaactaaaaatatacacatatttcttattgtagatgaagtgaaaagaacaatatttgggttcacatctatgggtgaatccttttaatcaccccctaaaataaaaaaggtgccatatttctatttttagagaaagatatagagcaccattggagtggttttgctccaaatatagagtttagagaaatatataatacaccattggagatgctctaaaatgaatttatttatttatttagatggaagattctaattggttagaaaaagaggaagtgaataataggattcacctataagagtgaacccaagtatttttaagagataatgtgtaaagtaaatagatggtcattgtgtgaattatgaatagaaccatggttttccatttttaattgcttaacatagggtaatcaacaatggggtttaatatgtcaatagacaatagtaaagaaagtatttgatctatcccaaatctttcttcgttcgttagttcatcactttctttctttttggttatattaatggtagagaactaaaaattcaactttttattcaaaagctccctttctctttccctcctttatttgccataaaagtgatttcaagaagacagcgagagagaaagtgatagttcgttcactcttcgctttctcaagaatttcaaaacaccaaaaaagtctttagattgaatttcatcaaaaacttttcttttcttagcaaaaaaaacaaaaaaatgagagagcttcttcttcttcttcttcttcattttcagtctctaattcttttgatgatcttcatcactgtctctgcttcttctgcttcaaatccttctttagctcctgtttactcttccatggctacattctctcctcgtattattcctcgttgacttcatttcattttatttttttagtttctgtgtttcttgatttgatctatgcctatgcgttctcgaacttcgaaaaatataaagaaaaaatagtttttaaaacttgataaattaaatgctatttatgagctactcacttcttgtctttttgtttttgtttttaaaaaaaaaaattgaaaatattatatttttcttatcagaattctttcttgaatttcgaaatatgggtttgattcagaatttctaagaaccatacttgacaaatttgacagttgaaaatcattaaaaggatttttttctgtgtcaggaatccaaatgggaagtggtgaagaagatagatttgatgctcataagaaacttctgattggtctcataatcagtttctcttctcttggccttataatcttgttctgttttggcttttgggtttatcgcaagaaccaatctccaaaatccatcaacaactcaggtactttcatcagtaatgagagaatatgcaataagtttcaatcactctatgttttcaatggaagttcaagtttcttgattgttctttgagatttagtagttcattgattcttatcactttcaagtttgtgtgagattatgtgttgatcttggtgcaatgttttatatgaagattctgagagtgggaattcattttccttgttaatgagacgacttggctcgattaaaactcagagaagaacttctatccaaaagggttacgtgcaatttttcgatatcaagaccctcgagaaagcgacaggcggttttaaagaaagtagtgtaatcggacaaggcggtttcggatgcgtttacaagggttgtttggacaataacgttaaagcagcggtcaagaagatcgagaacgttagccaagaagcaaaacgagaatttcaggtataaataacataaaccaagttctgtttttcatgttcagattcttgaatctatattgattcttggagatctcagaatgaagttgacttgttgagcaagatccatcactcgaacgttatatcattgttgggctctgcaagcgaaatcaactcgagtttcatcgtttatgagcttatggagaaaggatcattagatgaacagttacatggtaaaaacatgttcttatttgctcttgtttaacccaatgaagtatcttgcatatgaagtattcttaaattataaatgatagttaggacatgaattaaataattataattgattgtgttatctttataattaatgtgttagggccttctcgtggatcagctctaacatggcacatgcgtatgaagattgctcttgatacagctaggtatttaaagaaatagccgacactttttcaactcctagaccggttttctcatcggttaatatcggttttgattctgtcaaccgttttgctctgtttgactccagaggactagagtatctccatgagcattgtcgtccaccagttatccacagagatttgaaatcttcgaatattcttcttgattcttccttcaacgccaaggttcataccgcgtctttttttccctcaaaatgttgttgattagatgatttagatcttagttcttgtttcaatgtaaaatgagaatttcacaatcattatcattgcctatatttgcttttgagtaccgaataatcgcattgtttggttactgtttgattacaacaatgcagatttcagatttcggtcttgctgtatcgctggatgaacatggcaagaacaacattaaactctctgggacacttggttatgttgccccggaatacctccttgacggtacttatgttcactcttgactcgttctcatatcttaggtcgtgtagcacataatagtcatatatcatgtgatattattttgatatattgagtacttgtctcactctctcatggattcattatacgattacatttccacttaaataatcgttttgcgatgaatataactgtttatttttggatatgtatgtaggaaaactgacggataagagtgatgtttatgcatttggggtagttctgcttgaactcttgttgggtagacgaccagttgaaaaattaactccagctcaatgccaatctcttgtaacttgggtacgttttaacaactttctacgtacaaaatgaaacggttagtgatatatagatgtgttgatggtgtaggcaatgccacaacttaccgatagatccaagcttccaaacattgtggatgccgttataaaagatacaatggatctcaaacacttataccaggtttggtttcgagatagaaccggcttaagtccatcttgtttgtcactaaacttaattgatgcttcattaggcttgattagattgcaaatactttgtacattgttgaatcaagactgttaattcttttggtaggtagcagccatggctgtgttgtgcgtgcagccagaaccaagttaccggccgttgataaccgatgttcttcactcacttgttccactggttccggtagagctaggagggactctccggttaacaagatgattcacagaaacacgccaaaagaaatccaaagccatttagatgattttcttttatcctttgcctttatatttttttgtatagggttatgatccactcatctgaaagtttgggggtaagaatgtgagaatataagttttcagggttgttgagttctatataattatatttgtttctttttattgtcaaatataattatatttttgtatttgtaaattgcttatatatattcccacatcacagtttgcggctatggaaaaggcaaaaacttgaaattcaacatggtatcataattcaaacgcattgctccactccaaagcgagtcattatagcctgaaaatagtttaatatagtattcaattaacttgtctcatatatataaccatatataattgttagatccaaggttttgaagctaaccatgatgcatttgagaattgtagaaacggtctttgtagaccatgtagaggatctcaactttgtaaaatagtctagctagtttggctgtgatgtgactttttgttttcgttgtgagttctatcattttgttcgcttataatactttctttcaagtgttttcgtctccatgctctaactgtgtcgcatgttaatcgtgcgaaaccaaaatattgtttgatcccacacgtaaactgcgtctctattgaactcctttttcggaatgataaagtttaaacgatcttttaagaactctagtatataaaatgttgacgttattatagacaaggtttgagtagtcggatcaaaagtcaaaattgattagatatctcgtatagtatgactcaagatggtggagtagtcggatcaaaatgtcacagatacaactatgaattatgtttgagcagagataaagaaaataacaaatgagatttgatcattgtcaacgacggaataagcatgatcatgggcaaagaacgtaagtttgggaagagtaaacctctggatgagaaagatggtttagtctattgtggcatagtgacggttctgatggaggaaccggacctcgctgaagctggttatgtaaaccctgcaatcttcctaactccttttcccatatcggcaatttccccgaggttcccctttcgaccagagctagaagacacatcaccaaaatgaatctccacattctttagttgaaaaaggtttagtggttatatgttgaactataacacaaaggctagataacaaaagaatattttgagtaagaagtgaaaatatgaaaatgaaagaagaaaacgttgatggaactctctatatgtgtgtaacatatatagaggaatagagagtgggttgatttgaatgctaaattggtatttttgtcaacttctaatgataacttttagaaaattgacttgttctttgttataacattcattaaaatgttcaactttcgcgtgtagatttcaagatgcgtttattcaacgttgttatggtttttgggtgggttgatcatattttcaactattattatgtaagcaaccaaacattacaagaaactaggatatgtcatctctttttttaatcagtcttaagagaatgttgtaacttgtaagatttaagcatcaaaatcgcagagccaacagtcaataacgacggttggaacataatcgaaatggaagcaaaaaacacagccgacaaaaaaaaacaaatggccacacttcaattaacaaatataggtgacacctaaaaaaattacctctctaatacatcattgctttttgtgttgaccattacgttttgtatgttttttcaacaaaatccatttatcaattgagatgtttaccttaaacaaactgctgctcacaagggaaaaggtcgaatttgagtataattttagacacataattgtttttaaaaaattattggataaatttcaaagaatacaaaactatataaatatatttagatagctaatagatttttgccgaactcaaaaaagcaaattgcataagtctaccttaatcaatagaaattgtgttgccaaactcttacactttcattgatataaaatacatcaacagaataagaaaacttttatagaataatctgattgtacgaaaatgaatcttttttgatgttgctaggttcatacttaataacttcttaaacctcaagataactaaacccattacctaattagcaaaactgatgaggttgggctacacaatgtaattacaagctaaacattcaccacttcatcaacacttctataaacctcgagctaccctaactacacatcataccaattacaaaccaaaatgggaaggtattcaagtagatttcacccaaacaaaacaaacacttggttctactgaatgaagagcaatgaaccaattaaacaagttaaccaaaagtcatttccaaatctttaaactaatgaaaaactcaatgttactacaggaaactttggaaacataaatgattaaagatcgtcttacacaaatgtgaacaatcaaaactgataaagaaaacaaagtctttttcaaaagaacaaagctctcacaataagcaaaagtaaacctcttagaatccaagcttggttctgcgccaatgcctacgcttagcattgtacctgtaaaaccaaaacaaacacacttaagatttactaattctaaacctaatcattcaaactacgagaatctacagttccatttacgaacctgatggtgttgtcggtacgaagacgaatccagtgaggaataggcctgttttgcctcattttcttccccaatttcttcttaatcatgaacgacttgtgcgacggctgtttcatacaaagaagatatcatcaaaaatgattcaaagtcttaaactttcgtaacattaagataaaattcagtgtagatgattaaggttgaagcagagaagatcatcaaaatgattcaaagtctcgaacttccgtaacatttacatactaattgataatagaaaagtataaggattaagaatgaaggagatgtgaaaggatttaccatcttgaagtcttgcgatcttgttctgggccgagccgaaacactgagaaaccctaaatctggagaagaaacttgtagaaagcgatggaggtgagttttatatggggacacgatgctagggttaggttttatagattgggccacaaaggcccatttacttaagcatcttcttactatctcgttgtaacttactttcaggccttcggttataatatctggcctgccattggcttcggtccagcacaaaaatgttggataattgatgttttcaagattggaccggacttcgatttcgaacctgtagaaggaaaaaatgaatggtaaaagattaaattttaactctcctggatttgtggaggggatgtggttgattgactcaacatcatagctaacctattctttaagtcgtctagtacaccgattacatcgattaagaacttaatcgtttaacgcaaataaaaatctccaacaatcttttcttgttagaaagtaagtaattcgagaatatcatagtgatttggtttgttagagctgtgttttcgaatgcttgtaaaactagtttagagatgtttgtatcctgagatccttaaatcacatatttttgtcacactatatgtgtgcttagtatttaaatcattattgttttaatgaataaaaataattttgaaatatttcatccaaagacatttctttatttgtaatgtcaatggccaaataattttggaggatattaatttttggtaggtatcctctaaatgattagagaatgaaagttgagaaatcaatcacatgttttgaattgtctggtatgaaacaaaaagcaagcgagtaatgcaccaatctcgcaatgaattggtgtacgtttccatattaaatttgtagttggacattttcaaaccttttcttttgttagctggaatccaaaaaggaaccattaataaataaatttgcatacatatcaaatcacagagaaaataacgaatcaagcatgagggaaaaaaaaatacatattgtgtggcttcataacttcatcgcagtccacaaacttatctaaatatggctctacctaatacgatcaaaactatgttagtatatttaatcaaacacatatcttctatttttatattataatttttttgtagccaccaaatcaacaatattttggagttttgttgtagcaaactagaacaaactgaaacaaaccgaagcaaacttaaatccacatgtttgccgtcatctcattgttcacgtgtctataggtttagcatatagtcagcaacttaattttgtatcttccctttctaaagtttatatcatacaatgtacaacatttcgaaaatacgagtttcgtgtaaaatcgtatcgaatatagaactagttgatgaaatcatctactagtgatctctatgatgtttattttatatgcatgatttagagaaactacatctaaaaactgtgagttatcaagtgtcaatagctcaaaactggtaaaatattttagctaagcctagaggttgctggttccaataacatttgaaagaaaattctataaaatgctttagtcccatcccgagaggatgtattggcctaggccaaaacctcttagttattcaaaagaaaaaagatgtgagttagtaaagcaaagtttgttggatcatttacctcccacaaggccacaactattggttaattagtgttatatcatggacccaaaccgactcttaaaccaacaagaaacaaatatcttacttatcgcaaaactctttaattttttcatctaattatccataacaaatttattattttatactatcaaacacaacatatgtaatgttaagtaacatgaaaaccgagctttaacaagatacagttctatttctctttaccatttttagaattttggtagctttcactgtgactacaaacgttaaaaactaatataagtggaaaagattaaggaaactaggaaagagacaaaaagtcaagcgacttcaaaagaattgaactagaacataatctacatataaataatgtgaaaaccagcacaaaatatcaatgaacgtcagtttcggtctataaaatttatccacaaagttgctttcaatttctcgacattgacccactcttttgaattttcacaacatgacaactcattttcagacacataagccaactcaagtatagataaatactcaaatagtcatatccttacatataattagtgtctttttgtatgcatgtgcgtatataagatcaaccagtcatattaattgactatacctaaaaatgaaaatctctgctcttggtcgcggtggctcctcccctttgtccgcctgtttccatccttccgccaccgccatcaacgacgatctaccgtcggctcttccatccccatcaaatccatcgtatatctccacctccggcgacgctaccacaacttgtcagtaccacactaacgttggtgttttctttctttcatggtctcgatccttcctccgacgctctctccaccttcatttctactcatgcaactccacaaattgctatctacactctctagattgttaccgtcactccattcccttcgccttccggctcgaaatcaaacccttgacattctggagaaaaaatggatcaaagaagttatctcgaaagccggatattcgggtggtatgggacctgactcacgcaaaatttggatcaggacccgatccggaatccgggttttacgtggcagtctttgtatccggcgaagtaggtcttcttgtcggtggaggaaacttgaaacagagaccgaggagacaaatcttggtgtccaagaaagagaatctgtttggaaacagagtttactctacgaaaatcatgattcaaggaaaacttagagagattagtatcgacgttaaggttgttaacgacgatgctagtctccggtttagcgtagacgataagagtgtcctaaagattagtcagcttcaatggaaattcagaggaaacacaaagatcgtgatcgatggtgtgacaatacagatatcatgggatgttttcaactggctgtttggtggcaaggataaggttaaaccggataagattcccgccgtgttcttactccggtttgagaaccaagaggttgaaggaaacgacgttttgatgatgaacaagcgtgtaagagacgatgtcattttacggaaggagaattgtcgaacaccgtcgttttgggcgagtacgtatagtcattggtcttcttctaggatgtcttctgtgatggagtggtctagttgtagggaagaagatgagaggagcttcgggtctaagagttggttctctttgattatctatgcttggaggaagtaaaaacacactcaacttatctttatcaaaaaattttatttgtatataaagcaaccaattggctttgaggatatatgaaagtgtgtaagaatcagagttttggttttgttttgttcaaaacagaccagaaactcgtcgttgcaaaggaaccagtagagtagtaagaacaagcaaagggtaaaaaagtgtgttttgtgaaaatttcttaacaaacaatgcctcattggagatttaatcagtttagaaaaaaggcaaaagccaccagaattagaacaagggtgcaaaataagccctatatgattgtgcttaaacaaccaatgagataattataagatgatttagtagatgcttgatacaagtattatacagaggaaaaaacaaaagacgaaggaaaaaacgcgtatgcaacaagagtatgactcacaatttacacaattgtgtagtaacttacttagaatttgacttggtgcatacgttatcataacaaaaaaatagatgatattcctttaccggtttgaaaaagtagatgatagctccgttggttaaccttgcgactgaatatgggagaggtcccaaattcgagtctttgcaacggcgaaggaattaaaaattgtgaacacatggatgtttgagtacaaagcaatcatgtggagcacaagaaggagctgtacgccgggagcagcgagacttaaatgatgcaaattatatttgtttgttctcatatacacatcgtccttgattaccaaagaagcaccagctacataaaatatacatcaaaggaattatataatcatgcaactataacatttcattatctttttagtgaatcattgggatacaaaaaaatatgaccacacagagggtcaatgtgtttaaaactttgaaatgaagaagtttaaatgagagataaaacatagaaaaatatatgaatcatattctttttgtacatactcatgacctctctctctcctataagcaattgtacaaagaaaaatgatctacacacccaaaaaggttttcaataaccttagaacaaagcacgagcatgccccatatatgattgatactttgcttggcatgttcctctgttcttgtctttttactttttgtccttttcataaacaataattaaatgttcaaataatgatgataacaatcaagtcttgatgcttacgcttggcgacttctggtcttgagctttaggtcttcgatttttcttagaacccgaagacgaagaagaagaagaagaaggatgattaccacttgattttgctcgaatgtgtgaacgatgattatcaggtgtcgatgaagacggagaagaagacagtaaaggatctgatcgtgatcggtttcttagtttcttcttctcactttccgaaagctctccttttcctactcgtctcacttttgcctcgttcaaacgaggtggtaacacacagttgcagagaacccctatacaaaaacagttacctgcattacttgatgtgatctctcttatgccaaacaaaaacataacaatagtcacttgtgattggtttacctaagcgagcaagtcgattcacccatctagggattgatttctgagcaagtttaagacaaacttcattgcaaaaatggttgcagttccttgtgatgagatggtacttgtttccttgatactcttcagctaatttctccataaaaacacgaacttctttcgcaaccaagtcggttttccccacaagaatcgatttcctaaacgtgaaaccaggacacttctttggttccacttcaaaaatacctgtgcttgatgattcatgtgctccaaatgcatattcaactccatgaactacaaaacattagataagtaccaacaaccatcaagtccatcacaatctatggttactctattgatcacctaagcaatataccatctaaaatcagtttctctattaacacattacacaaaggcattctaaacagataaacataaaactcagtatcacaattcataaggctcaataaaaattggattttgctaaacagaacaaagaacccatgaacaatataatcatattctttcatcatcaaaatcaaaatttgagattttggtattctctggtcaattctcaagtcaattctctattaacccaataattctcaacaaatcaagtttcaaaaaacccaaaagccacttcctttagcaaccaaacaaacaaataaccaaaacccagaaaacaaaattaagaatcaaaaaagagagaatcatcaaattcaccttcaacaccagaatgaaaaacaccaagtccaagccaataaccataagcattcataggagttagatcgtagacattcagataaaccggaacagaaccggattgcttcttccgcttaaccgagcctttgaagcacaacatctctctcagtctccggcttcaatacatcacaagatcgaggaaagctttgagatagaatctgaaaaagggcagatcttggattagaagattgagactttataaaagggttcttcgtcgtttcatcttcttcttcttcccccaactgtttttgaagtttctgggaaattgggttaatgacaattttttgaggcttaagcaaaagagttatgttgtgttcttttagcacttgtttgtcttgtcgacttgaccatccgtttctgttaattcactgaatctggttatttgttttaaatatggtaagatatttttattttattttcagtgccacgcttcaatttgcatttattttagggttgttttgggtaaaaatataataaatttgaaaattacttagaggttttgtatttttatagaactaaatctatataattagaagaaacacagaaaaaatgtaaactagatattttatttatattggaaccaaaatagaataatttttatatacaaatagttcagtttcatttggttgtatggtaatggttgaagtctaaagttgtaatggaagattgatactctttacaaaatttgattttaatttgtatgttagtaattatgttatcgaagttaaagtaatttttagaaattaccaaagtgattatggtgataatttggttaaattacgaaattattataattttatcaatttttggtgctattcttcaatttacatttatttttggatcgctttggattaaaaaggtaataaatttgaaaattacaagagattttgtagttttataaaaatcaaatttaattatataattaaaagagcaatggcaggtggttagaacgatgatctaatgtcattttaaccaaagtgtgtgctctttcactcaaacaacagtagaatcctagctcatttccagttttgtggctgggaagtcactctggtgctgtgatcagcgattctcgtcaatgtcgtgagtggcttctccttttcttatctgctttagtttcttggttttaaatcataggagatgcagagttttttttgttttttttgtattcgtctggagattttctcttgttattttgggttgtgaagttgtgttctatgcgaaagcggtcaagcgtttcatatctattcgttttgtggctcatgcaatgaggatttgccggatttgctagatcgacagtgtgcttagtcaataataaagccattgatatttgccttctcccaacccaaatctagttatcgcttaggtgctccctatagtttcgatgccacaggcttagcttgaaagtggtttctcgttagccttcatccaacctttgtcttcgcactcactctttgttgtcttacctaagctaacaaagccccatttgtggatgctaacctggtcgatcaagtgtcattcttgttcctgatgtttatcaagatggttagctttcgcttcttgtctccaaatttccgaaactgattgagattagattcttttataaggattttataggcgctccattatgcatcaattgttttcgccgcatcaagaagtgttttatgaggttcattttttggcgtatacggactagattatgaagtcttgtgtatttggtttcgagagatcatctttcatcgagataagagaagaaaaatgttatcgataagttagccgtcggtagcattggttaatctcattcgctgatttagtttttcaaaagaaaaagcctagtatttttcatctagatattttgagctagttcggatcttcgggtccgggtattttacccagccttagatattacaacaaaaaatttgattgtaactgaaatttatgttggttaacataactttgatgaatatatacataattaatataaatgtcgaaactatggttttttcgtaaagtatcaacaatgaatatttcacattatcattgtagagatgtctcttttatatcacgtagtagtcgattgtgtaatattagaaagtaaatagagtacgttaccaacatatactctggccttgttgactacgattagatttcttttttatgtcgatagagttccccatagtaaacgaattcaaattaatatctataaaactaaactttttaaaaattaacttgtaggtatatattaaataatataatttgaacatactaaggcaaacaaatacattttccttcaatacaagcagataaaccagtcgggcattgatgagaagcaacacaatcagagaccgtcttgcacgacacatccgtcaccgagtaaatctgtttgaggcttggacattggcattgtttgttcacacattgtgcgcttccattagaacatcgaatcgatttacattgttctgatgtcttgcatggaactatcaactgagcttcagctctaggaatgctcaccaacaatatgtctgttcatttttaaaataaaatttgactggaatcaagctatgtttctaatcagtttcatttatataaaagaagatgagaggaatcaagacttaccggaaagaaagagagcgaacaaaatgagcattgttgcttttgatgccgacatatccctagcttgaaattttgtgtttgtcaatttagttttaagttctaagaacgtgatgttttgaatgttttctttattttaaaatcttatggtggatggcaatatttaaatagtgtgttttgatgcatgaaaatggcaacttaattagtgcattgactattttattggtgtttaatatcaacatattgactagaaatgcaaatctactattacatttttttggagataacataccttatatataagatacttttctaaattttgttttacatatccaaaacatgtctttttagatttttgatattcttcgtcgaaaatatccaactcccccaaagtcaagatttaagaaaatacctaatttttgtagagggacaatatagtatagggtgatttaactgaataaccatattttgtaaacaaattaagataaccatataacttttaattactgttttattttttttcaattttggttgtctgatctcattttttctatggccttctaagaaacaaacggtggcttggctatcatcgtttgcaatttctaataaacttttgttttaatatatatatatatatatatatatatatttatatatatagtttctcaaacgttttttcctttcttttctttattagtttcatcctaaacttagtttgaaccggcgacttctaaattttgcttagaatttttaccagttgagataaaaacacttgatttttctcaaagtttctacatccgtttattttaatgtatcattaaatagtatataattattacagtaattaaattaagctt

SEQ ID NO: 281 - DNA, 88770 bp, Arabidopsis thaliana
gaattccgcaatgcaggttaagagctctgtgaaagaggaaaacgaaaaacgcagaaggtgaagagcttatagaatagatataccatgtacagagaaaagtagagcagaaagttggttagtgacgtaaatcccttattttgaatatgcgagtcagattcttctttatgtaattaattgatgtatatgcacacacatgtctacatcagatcacctaatccattgtaaaattcgaaaccatcagtgtcattgtttcttgttcaccaaaaacaactaccatccatcactcatggtccacagagcagtcgttgaaaatcagtgaaagaagtgtcattttgtcccaaaaaaaaaggaaggacgaaggagactttttagttgaccaaatcatatggatctactaaaccgaaataaaccactcataaccattatagtaaattacttggttcggagtttttaatttccgatcgtcttcaacatcaccaaagcaaaaaactttagggttttagtgttttttagggttcttctttctctctacctctcagttctgcttttgctctgtctcccttcattggataaatcaattggtgttgttagcgaagaaataagaaagatgggtactgaagtttctacctcgccgacaagcctcattgatcagactgttgtgcgtattttctactaaaacctctgcttctttgattatcgttttagattgggattacattgaaagattaagttttgtgagatgggtttcaggttccaggtgatgttgttctcgatttatcaaacatgactaaccaaacaatcaaactcggcagtggtctccgtcaggtttttaactttctcaaaatcacttgttccaaatcttcgatcatttttttggagtttgaaatttgttgtgttgagtgtatgaatgaattaatgaatgttttgctcattattaaacaagttatgttgaattttggatcttgcattggcatttgaggaataaacttaatttggaatctacagtttgctttttgttgggcttgcaaggctagaagattgacatatgattttgaggttttttcaggataatgaggtgatatctgttatgagagctgggaagttgaggtactctaagccaaataagtattgggtggaaagttctcataaaagggtgagaactaattagtttcttgctggttgtattttgcaataaattggtacctttttcctgatatctcctagctctactagttattcgattgttcatctgcgcttaacttgtcgaaaaagtggtggttttgctctctagtttgaagaattactccatgttactcgattttgactctgttattatgttttttttgcagtatgtacctcgtcctgaggatcatgttcttggcattgtggtagattgtaaaggagaagtaagtactctaaagacgatccttaaatttttgttagagatccttttcccttggaccctctgaatcaagcattttttctctgtatacagttcatttaatgcaaaaatcatgtataaagaatattgatttcggttgtgctctatcattatccaacttctatcattgctcagcttgtttgttagttacatgtatatgttaataaatacttgagatcatggataaagaaaacggcataagcctttatttagagtgttgcccctagagttctcagccaaagtcatgttgcatgtaacaaagtagatcataatattttgaaaatcgttttgacacatgtttcattgcagaactattggatagacattaaaggaccacaattggctcttttgcctgtgcttgcatttgaaggagcaaacagaagaaattatcccaagtttgaggcaagtaccttctgaatatacttcttcaatctgaaccatcatcaaaatagtctctagctggtaactgcattcagttgtttgagatgttagtattgccattacagtgtattgagaatttccctggaaattacaatggcttgtgtgtgatattgaaaggatccagtacttcattggtttgtttatgagcataataggcacttttacttcgtctggagttgagctcatcaactctatttcaagtggattcgctgtattaagtgataacatagtgatcacgtgtttttgggagttgtgacaatttgttgatacaggtaagcactctgctttatactcgggttgtgaagacaaacacaggaatgaacccggagctgtcatgtgtagacggttagtccatccattcttttttctcacaaagtttaaaaagttaaatcatttccttgtttctccgcattaattgtttagactaagcaattgctgactagaattgttggacaatgtaatagaaagtggaaaggctgcaggatttggtcccttaaaagatggtttcatgtttgaaacttcaactggtttatctagaatgtgagtttcactcttattcctttatttttcttctagatgaagtggcctcttctcgactttttctcactcttacactttgttcttattaggttgttgagttcaccaacttgcccggtccttgaagctcttggaaagaaactctcgtttgagactgcgtttggcttaaatgggagatgttgggtaagaaaaacagtgattgcttcttaagaatccaaacaatgcaactggaaatcgcatggttaatatcttctgtctggtttcaggtgcatgcggctgctcctcgtatagtgattatcgtcgccaatgcgttgatgaattctgaaactttaagcgggacacaacagagaatcatggtagagaaattgctggagaaaatttcagactgaaaagtgtgttgtatgcttaacagtatcactactttataaaagaaacgttttaattcgcatctctttttttagtatgtagactacactcatatgtttctctttgagataaaaacaaaccaagattaaaatttaaaagaaacaacatgattcgtctaacgataaattgataagttttgggagatggattagaggaactagggtttggcaatattaattgaaaaatcaatcgataccaatacaataacagttacaaacattacggtgccttcatagcaaagcaattaataagaatttatttgacaacttctctcttatatataagtcttcagattttcctacttgaaaccaaaacgacatggagagacgcgatcaagacttgagttactaaaaacggcgactagattctaccataaccggagatttcccaaaccctaaaggcgagggttgttctacagtcgtcctatccgactctgctgtgaagaagttttcagacaatgtcgtctacagattgtacaccaagggtttggtggtggaaggtaaggaaaagaccgtgaagtctggattagagttgcgatttgcgatgagaaggagaatttgttgtatgagattaaagaatcactaagcgacactaagattagctgcatagaagtagagagcatggcactgattcgtgggttaagagaatccttcgatttggggatcagacaagtcgtggtttattgcgatgaccaactgctttaccaatatgtaagtgttttctcttctttgttattgctttagtttagttcttgaagtgtggaaatagttagaggccagattggtgattttgcatgttagaatatactttgaattctttggaatgatgatataatgtcttggttttaatgagagtgaattctgatttacattacagattgttggtcgagggaagattaagaagaaggttgtccatcttgtggacgaatttcaacttcttctagaagagatgacctatactgacgctgatttgattgcccttaacgatgttaattttgcttttaaacttgcaagagaagccatagtttcaagggacgatgtgaaggcagagatatgtagcatttgttttgaagaaaccgagggcgagcgcatgttctttaccacggaaaaatgcgttcaccgtcattgctttccttgtgtgaaacagtatgtggaagtgaagctcctaagcggaactgtgcccacatgccttgatgatggatgcaagtttaagctcacccttgaaagctgtagcaaggttttgacattagagctgattgagatgtggaaacaaaagatgaaagaggactcgattcccgctgcagagagaatctattgcccatatccaaactgctcaatgctaatgtccaaaaccgagctttctagtgaatccgacctatccaatgaccgttcttgtgtcaaatgttgtggactcttctgcattgattgcaaagtaccatcacattctgatttgtcgtgtgctgagtacaaaaaacttcaccatgaccctctagttgatgagttgaagctaaagtctctagcaaaggacaaaaaatggcgtcagtgtaaaatgtgtaggcacatgatcgaactttctcatgcctgcaaccacatgacttgcaggtatatatttatttaactcgattattctacatcattcgagtactttcatttcgtaatgttaaactttgtgcattcattgtgtagatgtggatatcagttttgttaccaatgtgaggttgaatggaagaatgaccaaaagacttgctcttctggttgcctactaacgggacatggttattatgatgattatgattataatgaaccggaatatgattttgaagtagatacatgtaattactattctgatgaagaaggtcgtcgttggcctagctatgaagaatatattgatcagcaaatggcaaatccaaaaatgatgttaactttcttatttactcctttgtttcttaaacttgcactgtattgttgtatttgactttgttatatggttcttgaagctatgacgcgccgagagatgatcaggatgtggaatactgagcagtttttcagtgaagaagagaatgctgatggaaatgatgacaattgggacgactacaacaattatggcggtttaactgttttctggaggctttgatgagaactttttcagggattattattctctttaatttctgcttggatcatcaaagacattagtttgttttgaaatacattccatctgatatttttaagaattttgagacactataggcctttggggtttctagtaggtagtaacacctttggggtttctttcattgttagttttttatttcaacctttttctcagtgtaatttagatgatggaaaaagcactagcgcacggtagctcttttttatttcatcaaactcaaatttctgtgtaatttagaaaacaaaacaaagaagaagtaaattacaaatgggaattaacacatgatcgacaaagctaaaattaaaagatgggaagagaacaattcttcacctccttttaaatcataaacaataaacactcttttataaactaaaactaacaaatggttttgtttaattgtaaaatctaaaccataatactaatttataagcccaaaccgaaatataatcaattttaaatatacatattatgtttccttaatttattttattttctaatttgaattttgatttatttcaaaatataatattacatatattgttaaattttgattggctatttaaaaagaagtgaataagagagccaataagttttttcatgggaaggttccaaaagcatgattagggtccgtagattttttcgttaggtatattccttacttaatgattcgtctaacagttcgttaaacgtatcataaatgcatattaatgggaatttaaacatttatagaaaatcaatcgataccaaaccaaaaacgcttacagatattacggtgcgtttataacaaaatttatttggcaacttctcaagcacgctttagtagtccctctcgctttcttcctctatatacattagtcttcagattttccagagaaaaattactaaaaacctaaatagtaatggagagacacgatcaagagttgagataccaaaaacggcgattaaggccctgttcatttccctgtcgctggatccagcgacagcgaccagcgaccagcgacagcaaccagcgacagcaaccagcgacagcaaccagcgacaacatacattgttcgtttgtctgtcgctggactcagcgaccaattacagcgacaatcgctaataattgtcgctgtgttgttcgtttgactgtcgttataaatagtcgctatatttttttttaaaattaattattttggtgctaatttatattttaaaatcaaaatgtaaattatatatatcctacaccatgagaaaaataaattaatatatttatttattttagttttatcaaatttaatttgactataattaatttatgttatttgaatttaatttattttaacttaatttaataagaattaaaactcaaacccttcgtgatatcgcagataaaaatattataaatttgtttatataataatttctttaaaacaaatctaactccaaatgatgcatatatgatatttatttaagtttaatttaatttaattctgtttaatttaattatttttatttattctttaatttatattttttgatcgctaagttgttcgtttgcatgtcgctggatccagcgatcaaaagtatcgactaatcgctaaaaccagcgactgatcgctaaaaatttcagcgaccaaaaattgcggtcgctgatcgctggcgattatcgctatttttggtcgctgaaccagcgacaggcaaacgaacaacttttggtcgttgtcgctggtttcagtcgccagcgacaagcaaacgaacagggcctaaattctattataaccggagatattccaaactctaaaggcgagggttcttctccagcggcaaaatttatggacaatgttgtctacagattgtgtttcaagggtttggtgaattatgaggcggttgcggacgatgtagaaaaggcagtgaaggctggatttggggttgcgatttgcgatgagaaggataatttgttgcatgagattaaagaatcacttagagacattgagattagtcgtagaggagtagagatcatggcactggttcgtggattaagtgaatccttcgatttggggatgagaaatgtcgtgatttattgtgatgacgattggatttaccaatctgtaagtggttctcttctttgttactgctttgggttagttattttggaatcatgagactataatagtgtgtggactattgatttattttgcatgttacaatatttttttcttctttttatgagtaactgaatttcgtagtgcgtatttaagttgcactccaaagataaatgtcacatataattgaaacgatgatgattttaatttgtttttagttttagattttggtcttcgttttttgctatagattataaaaataaaaataaaagttaaaaaattcagagatgaaacaaatcttgtgaaaaaaatagttttccacaaaaacctgaaaatcatggtttttagtattctttgaaacatggagaaaccattcaaaataaaatactagttttccaaaatcgttggaaattctaatttttttaatatcttgaagggtgagaaaatatattttcaatgaaataaaaaccaaaaaccacttaacaactagtaacttgagctttttttcaaatcaaaactagtaattattgtagaatcttagaagagtaatgatgattacgactttgacggtgatgatatattgtcttagtctaaggagaatatatctgattttcattgcagataattggtagagggaagtctaaaaagaagattgaccatcttgtggaagaagttcaaggcattttagaaaaaatggcctgtattgacgctgttttggttgcacggaacgatgttaagtttgcttttagacttgcaagagaagccataggcagaaacagcgttgatgtgaacgcagaacaaggagagacttgtggcatattttttgaagaaaccgatgtagagcacatgttcgttaccgagaaatgccttcaccgtcattgctttccttgtgtgaaacaacatgtgaaagtgaagctgcgtagcggaactgagcccacatgccttgaatatggatgcaagtttaagctcacccttgaaagatgtagtaaagtgttgacactaaagcttattgagatgtggaaacaaaagatgaaagaagactccattcccgctgcggagagaatatattgcccatatccaaactgctcgatgctgatgtccaaaaccgaactatccagtgaagccgacttatccaatgttaggacatgtgtcaaatgttgtggactattctgcattgattgcaaagtaccatcgcatactgatttatcgtatgatgattacaagaaacttcaccctgaccctctagttgatgacttgaagctcaagtctctcgcaaacgacaaaatgtggcgtcaatgtgtcaaatgtaggcatatgattgaactttctcatggctgtaaccacatgacttgcaggtatatatatttatttaactcgattttgctacatcatatgaatattttcattttgtaatgttttctttgtgcttgcattgtgtagatgtggttatgagttttgctatgaatgtgggattgaatggcagaaacgggacaaggtgattatgatgatgaagatagcgatgatgacgactcagaacatgattgtgaagaggatatgtgcgagtgctattatgatgaagatggtggtcgttggaatgattttgaagattttgtggatcaccaaaccgcacagtgatgctttgcccttttgttttactactttgattcttaaactctcactgcattgttgtgattgactttattttattatatggttcttgcagctacgatgcgccgagggatgatcaggatgtggtatacaagtatccttctcctgagcagtttttcagtgaagaaaggaatgctgatggagatgattacatttgggacgactacaacaattatggcggtttaactggcgataaaggaggctttgatgaaggctttttcagagattattattctctttaatttctgtttggatcaacacatagatttagtattggaagttgggaacacatgcattccatctttttcttttgcattttcttctttatgatctttgagaattttaaggacattattttttttcttaacattgcaataattacaaaattttttttatgtttttcttaattctcgtaattgtttaaaaaattattaatatacatatacataagtaaattgtcttttctagattttaattaacatttgtcatttgtattctgttattttccgatttgaaatcaatattcaataatgtagattttcccgaaaagaaaatacagaaaagggaactataacattatagaaattatcctacgaaataaaaaaaaagattatagaaatttaaaatttagagaatcaatcgacactctcattaacaaaatacgcttgcaaatattaaggaactttgataaagagcagtgaacgagaatttatttaataacttctcaagcaagctatattccctctctctcctcatctgtatatatatatagctagattttcacaagaaaaattggagactaatcagtcatggaaagagacgatattaacttgactttccaaaaacggcggatagattctgcgacaacagaaaatagtccaaaccctaaaggcgatgatagttccaaggtcgtcaactccgcctctccggcaacacaatcttacagattgtacttcaagggtttggttagcgaccagacgctagctgaaggcggcaaaagaatcgtgaatgctggatttggggttgcgatttgtgacaacacggatgagtttttgtttgagataaaggaatcactgagcaacgccgagattagtcgcaaaggagtagagatcgtggcacttattcgtgggctaagtgaatgcctcagtttcgggtttatgaatgtggtgatttattgtgatgaccatcaaatttaccaatatgtaagtgttttctttctctttttattgcttatgttaggttagaaattcataagactataatattgtggatgattgttacttttttttttttttgttcatgtaactagaaaatattatttatgagttctagcttagcttcaagctaggtcatctttgtacttgtattacgtcatggaatacaacacagaaactggtatgtaaatgagaagttcgaatagtcctttcacgttagatggttatttaactaattgttggcttcttgtgagaaatggcttttataaacattagcatgatctggaataacctagtagtatatcttgtgatgggagtagttaaattaagacgataatgacttcgattgttatgttacaatgtcttggtctaaggaattattttcatcgcagataattggtacgtagagagaagcctaagaagaaaattgcttgtggaagaagtcaaacgcctaagagaacaaatgacttttagtgaagctgttttggttgccaggaacgatgttaagtttgcttatagacttgcaagagaagaaatagtctctaaaagcagtagcgtaaatgtgaaggaagcacaaggagaaacttgtgtcatttgtcttgaagaaaccgtagctgatcgcatgttttttactgacaagtgtcttcatcgttattgcttttcttgtgttaaacagtatgtggaagtgaaactacttagcggaattgtgcccacatgccttgattatgaatgcaagttagagctcactcttgaaagttgtagcaaggttttgacaccaaatctgatagagatgtgggaacaaaagatgaaagaggactctaattcccgctgaagagaaaatctactgcccatatccaaactgctcattgttgatgtccataaccgagctttcgagctcttctgatgaagccttggaccaatccaatgttaggacatgtgtcaaatgcaatggactcttctgcattgattgtaaagtaccatcacattctgatttgtcgtgtgctgattacaagaaacttcaccctgaacttttagttgatgacataaagctaaagttactggcaaacgaaaatatgtggcgtcaatgtgtcatgtgtaggcacttgattgaactttctgatggttgcaatcacatgacttgcaggtacatatatatgtatatttggctcgattaagctagttcattcgaaaagtttatatttcataatgtctttatgcattgtatagatgtggatatcagttttgctatggatgtggaatcgaatggaagaaaaaccaagacacttgcccttctggttgccgggaaatgggacacggtgatgctgatagtgatgatgatgatgatgatgtggatgacgatgaagatgattattgcatgtaggatgaagatggtgttcgttgggatagctggaaagattatttggatggaaaaattttagagtgatgttttttgctctcttatttaacttctttgattcttaatttctgattggttcgtgattatgagaacttgaagttcacatacaaatgcagtatttgttggtgtgcctactgtttgatccgaaccaaggtatacaccattttcatctcacaaaatctaacctgtttttttacggtaattccctatcaacaaaagatccatcatagttatcgataactctatcaatacattgacaaaagatccatcataggaaaaaaatagagataagcaacaaaaattgttatggattcaaatctgagacattaaatttaaccaacaaattgttttattattactacccaacatatgcaaagttgataataaggactataattctccaatggaacttaattccaaactagctcctgctacgaagtctcaagccaaatcttcaaacactcatataacttcacatcttcttcgtaatctacaaataagtgaactactgtactagtctcaaacgctccaagtccttggattccaacttccctaacattgttcgtctcgagattgtagtagaaaagataataagggtcagatagatcatacggcgacaacacaatttcactagtaccaatcattccaacaatgcgcaacttggtggtcgcaacgatattccaccacataaaaggcaatacatagatacgcttcgtccatgtatttttcttgacatcctcaagaatccacaaatcaaaacttttactggttcaatcaattttccccgagtttgaacactgacatatacccaattgacccttctggttaatcagtttcgactagtgtttgatatctaatctgccaagttcgccgataaagctcaacttctcggacttgacatcaaaacaaactataacaaaatcctccctatcgcaattgagcttaccgagataatacaaaacaccattgatgcaaatcccagcgtcaaatacaggacgaagaggtttgcaacattggagcaatcgccaaatcattttaccagctcctaatgtcaggctctctactaggcttattattatccactcacaataaagaaaaattcaacacctagaagtgtgaaaacacacaccaaaaccagcagcattatgagataaaaacatatcagaatcagcaccttcaaaagtctgaaaacaacagcatgttatagtgaaaacacatttgcacctaaaataatctaaaataagcataatcacctaagtccgcgaaacggttgatgcatgatggccttagttaatctttaaccatattaaatttgattattgatctaaaatatattgacaaataaattgttttcagattttttttttgacatttataaattttcattttcatgaaataaatttatgaaccaaaacatatgttatgacaattaaggaagaaccaacatcattaccaaacatgaacttcaaaaatcccaataccaataccaaacataactccaaaacatttgagcctagtaacttctgatcctgattgcaatatatagcaatatataagatcttgaaaggaagttaatgtcaaataacagaaaatgaacttcatatatattttagatcaatgaaatatatgactaaagtttgttcagataacaacaagcacccatggcctaatggataaggcgcttgacttctaatcaagcgattgtgggttcgaatcccactgggtgtgatttgtatttttaaaagcatatttgcctttttcttctaagctggcaaagagaatgaaagaccaatttccgacggttgaatatgccaccttcttcgttcctctctggtcctagatatccgaaatcttgtaatttgatagcatgatcgttttcattcttaatataatcattttgctgaaaacagaaaagaaaaaatccaatatataaacacttccatatagaagtcgcgggatgggagattaatgagaagaaaagacatgcagctattttataaaaatgctcgtcaatgcattatggtgatgaaataacatcattgggttttctataagttaataatcttattctcattaattagtcaaaatatacgattggaggtttatatatagattgactttgacctaaaccatagccgtaaatcggaaaatgacaatggtttatctttgtgcaatactagttcaaaatgcaataatagtaaaaaataggaaacgtagggccttctccattagtgtataaagtactcatttctaactttttaatatatctttgtgccaaaccacattatgacctcaaaactacttcctctcctcctcaatctcatcttcctcttcttctttccccttctaaacgcatccgaacaaaaaccttgctacagtttctcatgtagtcaagagagcgtcgttgctcgtttccctttctccctattctcctatcaacctgagtcatgcggctactcaggattcaacctcatatgcaaagatgatgccaatactaccttaaagcttcctaagtctgaaccctttcttgttaaggagatcgactatgaaacacagcgtattcgcctcaacgaccctgagaattgtttggccagacgacttcttaactttgacccttcaggatctcctttttcttttcttcgctctcgtaactacacgttcttgatctgtcctaaggaagcgaacatcactgcatccttcagagctatcgattgccttggtaataccacttcctccttctttgttgtgcagtttgagaatctcggttcgatgccatcttcttgtcacatctttaagatattacctcttccattttcttggtttgtcgcctacacgacataccctgatggccaaaacagtcgagacatgtggctcaaatgggactcgccggattgtagagattgtgagaggagaactaattcaagatgtggattcaaaaacaatacttcccatcaagtcgaatgcttcagttctgttaaccctggtgcgtacaatctcaattcttctctgttcttttgtacttcacgatattccaacttgaaacgacatcatctacttttgaaaaagttctttcccaaagaatccataaatggttgaaagcttcaaatccaaggagttgttaattaaacaaagaaatgaatctagttggctttaaataatgacattaaaccattgacttgattagtaaatcaatatattttcaaatagcaaacatgagagaatgtcgtaacattagaatatatgaatacttgtacatacaagtttcaccgttgacccgttttgttgttttgaaaacaggacttcacaacacaggcttacaagtactaaagataatgtgcctctccctagtcggaccactcaccgccttgactttttgtgtcggtcttgtcatgtgcagttccgagagagtctcttcacagatacaacaagcagtggttgcacgcctttctggatccgtaacgtcgcagccaagcaacgaagtcgcaaggataggtctcgatgagtctacaattgagtcatacaagaaagttgagctaggggagagtaggagactcccgaccgggtcaaatgatgttgtttgtcccatttgtttgtcggaatatgcaaccaaagaaactgttaggtgtttacctgaatgtgaacattgcttccatactgaatgtattgatgcgtggctcaagttgcatagttcctgcccggtttgtcggagtaatccatctcctttgcgcgattgattgctttgaatagtcttgtagcgtttgtatgtaatttggaatttggatctctccataaatgcattacaaactgtgtcaaaactcaaaactaagcccaaacgccaagtttattagaaaagtaaaaatgcaaatgagaattcgtagattttcctcggcagattctatgaaaccacaaaattgggaaatttcatgggctatgaggaaataagtgattaattctatataatatttatcgataaattaataattaatttataaagagattattttaattttgtaatttttaaaacaattctatatggaaagtagttttttctttgtaattaatatatttctaaaaccaattacaagtagataaataattatttagtttaaaattttttatcgatgtaataaaaataataaaaatgaactcttccaaaaattaatacaaatttatgtaaaaaaaacaatattaaaattctatttcactaagaaaatttatatataatattttaaatatatataataataatttatagatgtcatatatataatattcttcgtccatatttgttagttatttaaaatcgtaatttctaccatcacaatttttactaatcatcatttataatatagtcaaagcccttataccaaattcatataacaaaagtttatattgtttagaggcagaattatcaataattaccaatcggctcctaacttatttaataacggttgaaactgtatctgtgtttgttttgtttcagcaaattcccgcatcctttgcgtttaaaccagtcctcgttaattgaagtttataataataccccgtccgagggtatgataagtaggtgaacttatctctctgactttggtcgctttcactacactacactagactgtccattagcggattaaacgaagacgacgagttaagcttttgctgacttgcaaatttctcattcgtcttctttctccaaatctcgatgccaatttagggattctacttgacgttccgtgcaatttcttcttctgcgctactagaattgatttctctcgaaccctaaatttcctctggacctcaatgcttgtttgtttctaattacttggttcaacgatgatcttagacgagaagaatcggaaaaatctcgtattcctcatcttacagttctttgatgaagagggctacgaagaaagcttacacttgtacggttgattttgatttttgtttctcaatagtttgattttaagctttgcttatacctaatttatgtgtggttttgttttgttatgaagattggagcaagattcaggtgttttcttcgattttagctacctttctaatgcaatccttaatggtaactggaaagacgcagatgactatctctcagcattcactagtccagaggcaaatactttttcaaggaagatgttctttggcttgttcaagttgaaattttccgaagcaccggataggcaatcattcctctacccttctcactgaatcattcatttcttataaatgtttgttttatcatcctttttggttatgttctgcagaagtggtggctctgaagctgtgaagatattctccaaggatttgagacggattcctgttttaaaagatgatagctttgatgatttggttgaagtgattgctgtagatgatatgaggcaaggattaagatatattattagctattaataagatgttacaatgcggatctcatagagtttttagtggtggctttgtttatagaattcctgaggagacttgttgtgtggacaaagcaccgggaagagccaaattgtgtgttgatcttcataaactagcagaaagcaatccttctttacgtggcaaacttgattttccaagtttgaataaatctgcattgctggctcttatctccctcctttgtccaaattgtagtaggagaaagggaggtttgaaggtaattttttacatattttcttatatccttatattgtaggaaccgaagattttggcttctcgggttcttttgtttctgatcagtgcgtttcttgtaggaagatctcatttgcttaatccttcaatttctctatgaagcgaagtacaagaacactctgcataagtaagttttgtagagataaatgtgatcttggatatattgttgtttacttattgttgaaattttttctttctgaagactagagcaagaaacaaaagtgttcttcaacttaaattatctggcggaagtgatgaagcttggtgaatatggtaaagctgaagagtatctgggagcttttacaaactgggaagataataagtactcaaaggctatgtttcttgaacttcagaaacttatatgcctacaatctacagaatggttggtttaaatttatttatctgcatcccaactatttggttaagaactttgcatatgatggaagcttgaacatagttgcaacatatagtagttatactcaattcatattgaagtattattatccccaaattctccactggtcagttttcactctgatgtatgttttcttctgcagggaggttgcaaccccatctggatctcttgataacatgtcgctgaagataaagctgcatgcctctgttgccatgctagccaagaagaatccagtactgaaagatgaactcaagtttcctagtatggaaaagtcaagacttttaacactggtgaagcagacgtaaggctgccaaagttgttgttttctagtctagattttctttctcgtggtttcttctagttctgattttcttcacctcatgcagtatggactggtggacatgcaacaatactagttctctggaaaatgttccagtagtgtcatatctttgtggcacaccatcttctatgaaattttttttcaagaaaacagtaccaaggaagaagaaaccaaacgaaatcaaagatccttctcagtgcaatgcactcgttcttcctgattgtttctcagaagaaaaggtgaggttactttctgcagaatctgttaaaatttgatgtatttcatgtcatccaaggcattcaatcacatttttaattgatctttaaaagggaaaaagaacatagctcttgagaaattctagccatcaaggatgatgctttgtttctcccaagaattatactttgttcagagtaatattatcagttaatttggggggaatgtctcatgttagcatttattatttgactacagaatttctgccacctgtgtatacattctcggtagtggcatcatctagaaaccatattctctgagatatatatcacgcttgaggtgttttgcatgaaagtctcacctacgtgtgtagtcctgcgatgaattttgaatgacaatgctgtttgttgatgcatatagtcaaatttgtcttctatatcttcaactattgagatctcattgaatttgttgacttggttagattgcacgtttgacctattccccttctggagattacatactggctttggcagaagacgccacacataaactctggacatggtcgagtagccaaaatgaattctgcaaggtatagtctcagatgccaaaatgatctctcctatgtttcagcgctgatgtcttgagtacttgattcgttaaatttttttgcttatagtatactcctaaaatattgaaggaaaatgtatatccaaagccacgattacatcaacctcaaagtgggaaaactatggaaaatgagatggccacctctgttcagaagtcaacgtcatgttttgcggtcaagggttcctatcttttctcgacttcaggaggaaagatagcagtttttgatctaaagaattttgaggtaataagcattgtagtgttataagcttttaggtcctgcctttgtgtctgcctcatcaaatgacactgtttgcacaataatgcagaaggtagcttcttttggaagtcctacacctatggctacgtattttatatttattcctggtgatttgcttgccgtcgggctagatgatggctctatctttatccattgtttatcctcgagaaaggtaaagtcatcattttcgtagtaatcgtctgaaaccgttttgcctgactttgtatgctgctaaaagatgttatgaagctgtaaatgtactaggtcaaagaaaagttggagggccacgaccagaaaataacctgcctagcattttctcgctgttttaatgtcctcgtctcatctgactctgatggaaaggtttgtacatgcatctgtagatactcaaaactgttgcttccaggatttttaattttttttacgttttctctagctctgtctttggagcacaaagagctgggttaagctaacaagtaagaactctacgcgtaaattttgcaaccggtctaaccttgaatccacctctttagtaactcacatccagtttgacccatatcaaattgagctactcgtggtccatgatgggtggataggattatacgaagttcgaactcttgattgccgtttgcaggtaaaaggcaaagactgttgtagactctcttctctgattatattcccttgcctctagctttaccttattgcctctaaataaaaaatgctacgcagtggatacccgatgcatctgatcctgcaataacttctgctacatattcttccgatggtgagatcatctatgttggatttagatgtggatctattaaaattgtggactccaagacttttatgacactatgtcaaatcaatctgacttcttttactcaactcagcaccagcaacatcaggtacagtttccttgtccacacttctattttggtttaaataatgatgtaattgattttgctactaaactggggatggcacagtctcgaggtttatccgactgttgttgccgctcatccttcacatcctaatcagatatcggctgggcttagtaatggtaaggtcattgtccttcagccgttgtggagtggaggatggggtgaagcagctccacttgaagacaatggagattattctaatgactcagatcatagttactgaccacagaggttgtcttagttttaagtatgtctctttgagctaactgatctttttgtatgtaattgagcttactgctctttttgaatgcttgtctatgtaacgtaattcgtaataaatgtgtcttcttgtgtattattcatcgtaaagcatctgccaaaaggctccctctacttgtaatagttatgacttagttattaagtggagacagaagattagcgctggtaaagttaatgcattatctttttgttcttcaataagattggaatatgtctatcaatttgcaggaacgtagtattttttcattatatatctatttttattacacaagatttctagatggctcatggacggtgtcggtgagagacgtctaaatataaaaaaaaaatcaacgctttcgaacttcgattccccacttaccttttttccaactgaagttttattaataatttgttgtaaaacaattgtaaattacaatgttcaaataagaaaaactaaagcagatggacgaaataaatgtttttggagttaaattcggagaaaaatatgatttctgcggaacctataccctatggaaaagaagtttttaaaaaaatactactaaaaaaacataaagcagaaaaaactcaaacctaaaacaaaagaagacgaaccttttaactaaaaacaataaaacataggggatgattagggatgagtttgaagtctgtaaatttttaacaatctttacagttttaattttaacaatcagacatttttcacttttaataattaaaaagttctcacaacattttcttcttattttgttcattgattttagttattttttttatgtctcgaaaacaaaacttaaaattataaaaaaaaaaaaagtcaatagttttcacccatatgtatgaaaaaatctgaaaaaattcactcaatgataaaattttaaaatatttcagttgatttacaattgatttttgtttttttataaactcattttccacattttcaatagttatacactatactcacaacttctatcaatcgtttataatattttaaagttaaagttcttacggcaaaagcagaagtctttccgattctccccttacctacattttctcttgttgtgaaaaaaggtcctaatattttctgcttctacgacaaaacaaatttatattttctcttgttttacttttcacctacatttcaaaaaaaaactagagttaattttccactcagaaaataataatctgttattaagcaaattacatgtatgacaaacaaaaaaaaagtaaaaaacaaagtacatctttaccttccgacaagcacacaactcccgacagtgccggtaaaaaaagctttagcatctccttctctccaaaatcaacgacttaaaagtcgccacgtcatcacggactccaactttcctcttaaatccatctctgctctctctctctctcttcagccaccaccattctcttttactccttcgccgaatctcacaacgccaaattttggcgtttccacagatctatacatcccggagatctccaacaaatccgacaccgttttctactccgacgaatcctcctccgtagatctagtcaaaaaacgaacctaacggtaatttctaaatatagctcaaagaaaaatcgatttcaaattgtgtttcccgttagattctttatcaatcaaaactcagatttcgcacgaatctctcatcaatgtcaaaatcattttcgattcttctttttttttgaacagtttgtgtttaactttttctcagaaattcgaaatcctgatcggagatggctccgagtattcgaaaagcgattggtgcggttaaagaccaaacaagcataggaatcgctaaagtagcaagcaacatggctccagatctagaagtagccatcgtgaaagctacaagtcacgacgacgatcccgcaagcgagaaatacattcgtgagattctaaacctgacctctctctctcgcggctacatcctcgcttgtgttacttccgtttcacggcgattgagtaagacgcgtgattgggttgttgctctcaaggctcttatgcttgtgcatagacttcttaatgaaggagatcctatttttcaagaagagattctttattcaactagacgaggtacgaggatgttaaacatgtctgattttcgcgatgaagcgcattcgagttcgtgggatcattcggctttcgttagaacttatgctggttacttggatcagaggcttgagttagctttgtttgagaggaaaagtggtgtgtcggtgaatagtggtggtaatagtagtcatcatagtaataatgatgatcgatatgggagaggaagagatgatttcaggtctccaccgccgcgttcttatgattatgagaacggtggtggtggtggtagtgactttagaggtgataataatggttatggtggtgtaccgaagagatctcggtcttacggagatatgactgagatgggaggaggaggaggaggaggagggagagatgagaagaaagttgttacgcctttaagggaaatgacgcccgaaaggattttcggaaagatgggtcatcttcaacggttacttgataggtttttgtcattgagacctactggtttagctaagaacagtaggatgatattgatcgcgttgtatcccgttgtgagggagagttttaagctgtatgctgatatttgtgaggttttggctgttttgttggataagtttttcgatatggagtattcggattgtgtcaaggcctttgatgcttatgctagtgcggctaaacagattgatgagcttattgcgttttataattggtgtaaggaaacgggtgtggcgagatcgtctgagtatccggaagttcagaggattacaagcaagttgttggagactttggaagagtttgttagagatagggcaaaaagagggaagagtcccgagaggaaagagatcgaagctcctcctccggtagttgaagaagaggagcctgagcctgatatgaatgagatcaaagctcttcctcctcccgagaattacactcctccacctccgcctgaaccagaacctcagcccgaaaaaccgcaatttaccgaggatttagttaacttgagggaggatgaagtcacagctgatgaccaagggaacaagtttgcgcttgcactctttgctggtccaccgggtaataacggaaaatgggaagctttctcctcgaacggagtgacctctgcttggcagaatcccgctgcagagcccggtaaagcggattgggaattggcattggttgaaacaacgagcaatttagaaaaacagacagccgctttgggtggtgggttcgataacttgttgctcaacgggatgtatgatcaaggaatggtcagacaacacgttagcacctcgcaattgacaggtggtagcgcgagcagcgtagctttacccttacctggtaaaaccaacaatcaagtattagccttacctgcaccagatggaaccgttgagaaagtgaaccaagacccattcgcagcttcactaaccattccaccaccttcgtacgtgcaaatggccgagatggagaagaagcagtatctactgagccaagagcagcagctatggcagcaatatcaacgtgatgggatgagaggtcaagccagtttggcgaagatgaacaccggtccagttccggcttacggaatgccacctgtcaacgggatgggaccgccaccgacggggtattactacaacaatccttactgattcattcttttttgcacccattcatatatgtgtagatgactcgtcttccacctttgatcttgtgtgtgttttattatatcccctcggattgtcgtaaaacgattccatcttcttccttgtctctgctcgagtttgatttatagtttatgtacactttcttgagaatcttgattcccttctgtataacattttgatatcattcatgtttccactgtttaacttaagaacacttctgtcggatagtcttaacttgcaaagtctccataggacttattatatttgggttgtgttgtccaaaacaaacaagtgaaacatagccactctttcaagtttgaagccattggttcatttgtacattattaggtgagacagatttgtcgctttcgtatatttctttctaatattccaggagatgtttactataaattaaattcatcttttttatagttgggattggaaaatgaaagcacgagaagtctctgttagattaaaagagttaggtgacccaataggttatatataatgatagataatgtgtgaccgtccactaccatccataagtatgtataatgacaaattctttatattatttgcttgtggagaataatacaaaagaaaagctaagctggagtctcttcatgaccaactcaaataagggtgtctcatttttgtaaacaggtcacgtacacgtttctggataacttaatttgatttatcattatcactgttattataattagacatggtcacatggacaatacccgatgaaaccgaaccaaaaccgaataggttttaattactgaattgatcttaatttttatatccaaagaatcgcaaccaaatccgatatctaatagatactctaaagtatcgggaatataaatatttatcttaaaaatattatttatatttataattgtaatagtccaatacaaaaatgatattttaattaaaatgatatcttcttaatatatttcttatattcttaattaaaaaaaaaaaaaaaactatcttaaatgatatatacgaaaataagaataatcattatgaaaataaataaaacaacggaaaacttataatacgatacaatacattatcaagcacacaaaacaactaaaaacacataacttaatcagtacaaaatttgagaaattcaattgcttaccatttgagaaattcaatcgctctaccattcgtaacaattttattatccgttgaagtaaaagaataagggagtgcatgaaatgaatatgctattacagattaataatgttgacctataaaattcgtgatagattaattcaagttctaaagtaagcccaattatttttgtttcaaaaaaaaaaagaacatgcccaaaactatttttgagttgattttactttttttatccaaaagaaaaattgttttccctaaggcctccaattattgggccggggctgttaacagaagcactaaaaagagctctatactagaatcactgaagcagaactctccctaaagacctcaaattattgagcagaactctagtatacgcacacggcgtgagaatgaagaatcagataaatcttctccataatgtaatcactttgacaagtccttaactttgaagtttgaacttcgacaaatccacaaacaaacaataatcaatgcccactttatcacgtccccaactttgaactttgacaatcaacacaaaataatcaatgccacacatgttattttgtaaagctctaagggctacaaacttctccatcccccaatccaaaaacgtatcaaatttgtctcaacatacatattaaaaatttcaaactgatgtattccaatccaaattttacgttgatgaaatatactaacgtagatttcacgtcatgatttgagtggctcttagacattatcttggcaattacgcatacttttctgctgactttagttatagctctgacttcttataagtcaagttatgtttcaatgaaaaatgaaaacccacatctttatttctaccaaatttttctctcacttttcttaaacaaaatcattattcttaaaaatatttcatgaagactatgtccaaatcgtctttgcgtttgcattttctctcgctactcttactttgttgtgtctccccttcaagctttgtcattataagattcattacacataatcattttgatggtctagtacgttgtcatccccacaagtttcaagcccttacgcagttcaagaacgagtttgatacccgccgttgcaaccacagtaactactttaatggaatctggtgtgataactccaaggtgcggtcacaaagctacgactacgggactgtctcagtggaactctcaaatcaaacagtagcctcttccagtttcatcatcttcgctaccttgatctctctcacaacaacttcacctcctcttccctcccttccgagtttggcaatctcaacaaattagaggttttatctctttcctttaatagcttccttggtcaagttccttcctcattaagtaacctaagcatgctttctcagttagacctttcccaaaacgatctcaccggtagtttcccactttgcggaatctaaccaagctcacagttttagacctttctcataatcacttctccggaactttgaagcccaacaatagcctctttgagttacaccaccttcgttaccttaatctcgaggtcaacaacttcagttcctcactcccttccgagtttggctatctcaacaatttacaggtcttttctctttcctctagtggcttctttggtcaagttcctcccacaattagtaacctaaccgagttaaaacttttgtaccttgaccaaaacaagctcaccggtagtttcccgcttgtacaaagtataactaacctctccgttctaaatctttatgataatgatttctctggaaccattccttcttccctcctcactcttccttttttattttatctcgatctccgtaaaaaccatttcaccagttctatggaagttcctaactcccttacgtcgtctaggcttgaatacatgtacctagggcataacaattttgaaggaaatatcatagagcctgtctcaaagctcaccaacctcacacatctcgatctatctttcctaaacacaagctacccaattgacttaagactcttctcctctctcaaatctttggtgcaccttgatctttctggtaacaatatatctccagccagtttaagttcagattcatacatcccatcaaacatggcaatgttgttcttaaagcactgtggcctcaaagagttcccaaacatattcaagacccttaaaaaaatggaggctatagacgtatccaacaatagaatcaacgggaaaatccctgagtggttatggagccttcctcttcttcatttagtgaatattttaaataattcttttgacggtttcgaaggatcaacggaagttttagtaaattcatcggttcggatattacttttggagtcaaacaactttgaaggagcacttcctagtctaccacactctatcaacgccttctccgcgggtcataacaatttcactggagagatacctctttcaatctgcaccagaacctcacttggtgtccttgatctaaactacaacaacctcattggtccggtttctcaatgtttgagtaatgtcacgtttgtaaatctccggaaaaacaatttggaaggaactattcctgagactttcattgtcggttcctcgataaggacacttgatgttggatacaatcgactaacgggaaagcttccaaggtctcttttgaactgctcatctctagagtttctaagcgttgacaacaacagaatcaaagacacatttcctttctggctcaaggctttaccaaagttacaagtccttaccctaagttcaaacaagttttatggtcctatatctcctcctcatcaaggtcctctcgggtttccagagctgagaatacttgagatatctgataataagtttactggaagcttgtcgtcaagatactttgagaattggaaagcatcgtccgccatgatgaatgaatatgtgggtttatatatggtttacgagaagaatccttatggtgtagttgtctatacctttttggatcgtatagatttgaaatacaaaggtctaaacatggagcaagcgagggttctcacttcctacagcgccattgatttttctagaaatctacttgaaggaaatattcctgaatccattggacttttaaaggcattgattgcactaaacttatcgaacaacgcttttacaggccatattcctcagtctttggcaaatcttaaggagctccagtcactagacatgtctaggaaccaactctcagggactattcctaatggactcaagcaactctcgtttttggcttacataagtgtgtctcataaccaactcaagggtgaaataccacaaggaacacaaattactgggcaattgaaatcttcctttgaagggaatgtaggactttgtggtcttcctctcgaggaaaggtgcttcgacaatagtgcatctccaacgcagcaccacaagcaagacgaagaagaagaagaagaacaagtgttacactggaaagcggtggcaatggggtatggacctggattgttggttggatttgcaattgcatatgtcattgcttcatacaagccggagtggctaaccaagataattggtccgaataagcgcagaaactagtaggatgtttttggttttgagtttgaatatttcatgtttgtcaaatagtttgtattgaagcatttgcttgtattttacttatttatctataaagtaagaatggtgaaattctatgtacttatattcatatacatttttgttttttctaacgaaaaacatagcagaggcagggaagaggtgaatgtggttaattttgggtttagtaataaaagattagattgatccactcaataacaattccagaaaacatactaatatatatatgctgtattattattgcagcatcttaaaatgcataaatctatattaacaattttggaatacatttatatataataataataaaaaacgtttattgaagtaagatattacacaaatgcattgatttaaataacaaaatcaaacatttggtatacaaaggaaagaaagatagacgccaaagtgttgtcttaggcctctcgatatatataacaaaacaaaatgaattggtgtgtggataatttcaatttcaataactaaataatcacattatctttgctataatattgtttgatgttgatatgttataagaaagaatataaacctcatattaaaggtaaattgagattataacaaatggaaaatccttaaatacaatctcgatgtttatttaagattttacataattaaaggttcacactcttttttttattttttttttatttttaggttcactctccttgattgatccatactctctctggtttgggtcaaacatgcagccgaaactcacaacggaagaattattgaatgatacgttcaaggtcttgaacatggtacgtcacagcgtgcaccaaattttattggaaactcaagaaaacctctgagatataggttcaagtttcagatccttaaatggtccaacgaagaattcccattaggttttctagccacatagtgattggaggattccgaggtggtgtctctgtattttggagggtttagctcagacagaagctctttaatgggtccatatactctcgaacttggtgaagtaaaagtatgcacaaagaaacaagcgaccgaaatgcgcggctcttcacctccatttgccaaaattctatgctccatgcttacaaacttgtcattcgagataagctgcaaaaaaaaaaaaaaagacttactttttgtgacttatgggtttttatagaccattcaattcaagagtaaacaacgacttgcctggaggaaatctcctacgttaaagataagtgcttcgggattaggaggaacatcgatccagtatccatcgtagagaacttgaagtcctccattgttgtcgttaagaagaatagtaaggaaagatctgtctgtgtgctgagcgccgccgaatgttcggtttggctcaggacagggtggaaaacaatgacagagcatccataaaccttttgcgcaatccatttctttgaggtggttaggactcaaccctaaagcttctgataaaatttcaaacattaactccgctaacttcatcacttcctttgagtactccaacatgatctccctaacaatattcacaccaaccaattttcaaaccacatcaataatatcaaatcaaagtttaaactagtcttgtttcttcttagattagaaataaattaaagaaatgtattcttacccacaaacctcaggtaagtcctgtgcttttggaacatcaggagccatgacacaacttaaggtatctctccaactcgcagcaggagactcatagagatcagcattagagtgatatttaagctttttggttttgtctcgggtatagaacattttcctcacttctggatcttggtcgtgaaaccgacgaataccatttatcatcttctccatcacatcaagtggaaccccatggttaatcgcctggaaaaatccaaacttctccattgcgtctttaaccttcgcaactacactctctcgcacgaccgtggattcgaacacgccacctagatcgattgttggaatcatcaccaccgtcgatgtaggcttagggtttgctacgttaacatgcgggttatggaaaatgcgcgggacttttgtgactccggcgtcgacgagtcctttcacgccaatcttcatctcgtcgaatgcttttaactcactggcacggtcgtagttttccgccatagtgttttttattttatattttttggtatacaaaggaaagaaagatagacgtgtaagtgttgtcttaggcctctcgatatatataacaaaacaaaatgaattggtgtgtggataatttcaatttcaataactaaataatcacattatctttgctataatattgtttgatgttgatatgttataagaaagagagacgtgtaagtctcttagattaataaatatttattagctgtttcttaggttaataaatgataaaaattaaagatttaattattaatttaagtaagagacgtttcaaggtaagaagtgctcttagagttattgtggtggttatgtggcgtagttttactgggtagatgattaaatattttttttttttaaatcacaataacctctcgatatatataacaaaacaaaatgaattggtatatggattaatttcaattacaataaccaaataatcacattatctttgctataatattgtttgatgttgatatgccataagaaaaagagacgtgtaaatctgttaagttaataaatatttattagttgtcttttaggttaataaatgataaaaatctgtttagtgttcaccggtctagaagttccactgcacgtgtttgatatgggtaaagctgtaaactattaggttgagatattttagataatttatatactattaaaatcgcaatattagataagaaaattgtggtggacgtgtttgatatgtgtaaagctttaaattattaggttgagatattttataaaatttatatactattaaaatcgcaatattagataagaaaattgtggtggttggttcatctcgtcgaatgcttttaactcacccaaacgatcgtattttcccgccatggggtctccttttatttttttcctttgtatacaaactacaaagaaagaaaaagaaaaagagacgtgtgtggcctctccgtatgtataacaaaacaaaatgaagtggtgtgtcaggatcaaattcaatttcaataaccagtcacaatatctttcaatttctggaatttctatctacatttagcataacctttcatattattttttacacttatttgtcttgtgcttttgaccttgaaagtttttacccatacataatataaaatatttgaatgtgcaaacccgacatacacaaaatatttgataaaaagttaaatctctctaattataactttgataaaatgaaagtttaattttatctcatttatcaaacctaaaatctctaccgactatctttagcctataaatataataattgactgaggattcatgcgctcgttcgttgaccaaaaaaaaaggaaaaaagactaaggattcatgtgcaacatggcccaaaagcctttatcttctcttcctttcatgttgactcttcttcttcttcttttcttcattacacaaacaaacatcttctttcttcttctcttcttacgattcttcttctcatcttctcttgatcttgtcaagtaggattaagtatttccaacatcacctacattaggtttgggttcgggttttgttctcggctgaggaatgtactcgaaaacatgtcaaaaagaaaccctgattggattttagtacctaagccatgacaaatgataactttttcttgacttattatatccaacacattctctcaagaacattataacgaaccacatgcaccatcctaaatctacactcccattgaatatctctcaccatcctaacaaatctacactaacgagtcaccaatcaatagtcagaaaaaaaaaaaaaaaactctaatcactactagtcaatataatatgatgcaaatcaatctgaagtctctcatgaagaagagacacatccactacattccctttctcctcctttgccgccaactccgccaccggaatcgccgccaaaaagctctttatatattctctacaacactttttaccctcacaaaccaacttctccgacgattcctctttctcatacatcaaactcgaatcatcaaacttaagaatgtaagcttgcttgcatccttcaaacaatctctcccctaacgaatcaataacgcaaaaaccatctaaatctgcctttaccacgaagaaatgatcgttccagctaacaatataaaccctagtttcaccattacttgaggctaacgctacttctttctctacctcgtcccaaatctgatcaaacgacatcagaccatccaacgaagcaaatctctccgggctgaataacccggtaaacgatttatcggtacaaaccctaaccggtcgtaaatttgcggaaacgatcgtttccagatcgaaatgcctgtttggaaacaatcttagatacgattctttgtcgcaaagagattgccataaagaagacccttgcgtgattagtgaatcgaacgctgttcctgaaggattgatgagcttaggattcgcgtggaaccaatgagccaccaccaccgcaaccgccgcgcatgctgcttctccggcggcttgttcgcttctttgatcaatcgacgctaagtaaacttccgatttcagcttcgattttccatcgcggctcactaaatccttcattacccatttgtttgcctcgattggtatctccgtcgccggtttttctagttcctccgatggttttgttgatgtcttcgtaacttcatcctctctctgcaaacaataaaccggtccggttaaggacaaaatcgaaccgagtttgaaaattcagaaagtcaaatgcgtaccggttctcttctccatgtcatagaaaagcttaaccgtcttctcttccaccaattaaacccggctttttgacccggttcagactggttctcatccgggcttgaaaataacccggtttcaactacggggctacgtccgcctgaactcgacgcggtggctggggaggaaaaagagtcgaaatggctaccaccgccgcgacgactcgttgactttttcttcggaattgctgagtcaacggagatctgaccaagttgcataaagtcgtctggttcggttcttacctcagaaaaagtcacgttgacctgatttaaataaacaaccgcgtgtcttaattaattaaggatttaggataagataattaatttacttgttctttctaagggaagtctttaaaacctttccatgatgtttccgagaataatttaataaccatagaggacaagaataattcaaattcaaaacgagtattggtggattaattaaaaatgtgtttagattttaattgaccagattaattaccacaagtgttgcttccttcgaaagtacggaaccctttgaccgaatcggaagctttctctccaccgtcgattcttgtttcgacgctaactccgataaatccaacgatgcttttccgatcaaagactttttgttttttgcgtccatattctcacccttataccaaaaatagatgatttcagctaattgcattttaaacatcaaattgattatctaaaaagagaataattaagaaaactcacgtagaagacattgaaggagaggttccatgggccaacaatgcaacaaacgcgttcgaactcttcctcccattctacgtggtttgagcctaaagcaatcggtttagagctcgtatggttaaccggtcgattagaacgatagaatgggacgaagcccaatccaaaaccggagacaggtcccttccatttcacctccaccatcgcggaaaggttctttcctgccgtttcatcaccgagaatagccggtaaaccatcaagcctcaccggcttcaccgtcacgtgaagcttcctcaccttctttgccatagatttcaaaagttattcctctgttttttttagggtttctttctctgtttttttttttggggtttttcctctgtttttttgtttcttttaggtgttgatataaatgtgtgactaaaaaggaggcgataatttgttggtttatatatagatgtatgtaaatgtgtacgtagaggcgtatcatacgcattgtatgtcttctaaataaggctaaggaaacgtagagaacattaaaaaagaatcaaagacagcaaagaaagaaaccctccaagaaaacacaattaaaaatggccaaacaaagagcgacttggtcagcaaacgcagcaaatccgcgtttgaggctatcgataaaaggaattaaaaacatcacgtgtgactcacatggtctggtttccgcgggctaatgctgacgtgcctattactaattggatggatgagtttggtacattggtttaagacaagacaagcgaaactttctctgtctaaacaacttttgcaagacaagagaacttattttcggactggttcatctctactcctttcatcattttaaaatttgcttcaaattgttaaataatggttaatatttcaataaaacatttggaaaaaattatgaaagttcgtggaaatataatctttggatttattttctattatatgataaaaaaaagttaactcgttcaaagaggacaaaggaatcctaattttctttccaaaatacataatgcttttttttttgttctttaatagtacatataatgctttttcgttaaaggatcagcaagaccagtaaaacgtttccacgtcaacacggataaagcaacaaaatgcacgtgaacacatttgtttactccaagcaagttatgtacttccttccttccttcctacttgtgtcgtagaggagaacagacgattctcctgccacgtgtttctgacgatttatttcctatacgagcacgtgttttttctctgtgtttgttttttgataacttttttaatgcatttcagcgtttttgtgctaaaatattggttctataatctacaatttcgaacaaggaacaagcaataaaggtggaatttgataagcagatcaaatggaataagtacaataagtgtagatgagatacaaatttggaatggtaaaggaactagtacatttacaactgtgttttttttggatgacaaaggaccacaacgcagtcgtactatagctaaaagcgtaaaagtagtacgcaaacatactttagctaaaatcagcacgcaaatatatgtttgagagattctaaataaaggaggggaaaacgttttttttctttcatatccaaaccatgaaaaaccattaagtgaagtacttgtataaataaaaggtgaaatcgtataaattttcaaatttcatatctgaattaataaaaggtgacttaatgcatacattgactgccactaatatataagtcaatctgttaagatggatgtcatggcaccttccggacgccgttgaattatcaatatttgccctcacacatatttttatcattccaccaaatttaacttcctaattatatttggtattttaaattcatgttttaaatccacatttaatgagacaagaagcgcttaatatatagggtatgttacctgttgaaatagaatacattcatagtattagagatgggtaaaacaacaaataaaacagaataaaattgaaagtcattaatccaaacaaaaaaaaaactattttcatccattgttgtagaaatgtctataccaaaccaaaactggatcggaactttgtctatcaaactggtttgatctagattttagaacttagttttctaaacggtaattctcttgaggaatttatcgccttcttcaatatacggtaaaatattcatctgataaaaaaaaaaaaagaattgtgttttttggaaaaaacttctaatttttaatatttaatgatgctgtccctaacttttttttggtctaatgttaaatttataccaatgaaaaaaggtttacataatgcaatgttaacccaaaaacacaccaagctctgaaacagagagagcaaaagagcacttatacaaaaagaaaagagctaacggcacacctacaagggggcttattgattcaattaacatgtcaggtgacatggcatccaactcagcggagcctgggaaaaccatgttagaattcgaaccctggagatcaatgttactcgaaccaagattacagaaacttttctctcttttaccactagctagaccaatgcgacttggtttaggtataatttgaatatgtttggaattgagatgattatgaaattgtagcgattggaattcataagttgctttttcttcaatcataaacactatagatcaagtggtattggattcactattcaacttaagttaatcaacaagtgacgagacttcatctatgtaaaacaaagaaattgcacatgagctggtaaaatttattattttgttcgacttgtttttcttccaccaatgcacctgtgttcatactgcattttaaagcttacattgaggtgtttggacatcaatcatacaatccagtattgtagactttgaaccctttttttttgcccaatccaatgaaagggaagatgttcatgggtcaaaattcatctgactattgaggtagccacatggctacaaaagtagtatccttcacatgacttaaacttaacatacttcgtggtagaagtatatgcatcttaagccacacatatattatccgatattcaaagaccttcttttgtcttttcatacaatttcaaagtaaacgatagtggtcactcaacttaactcatgtcacatgacttttaaatgtgtacattaacagagactttgactcttttttgttttctttattaatatacaatcatttctagttgaatacttataaccgttgaggtctttgcattgaactcacactcaaactgattaggagttttatttcatttgctttttaatgttacttgcaatggaagggaagcttttcttgtgccaatacttgatatgggtgatgttactgttggggcagctacatggttgcacaagctgcattgagaaagaaagggaagctttgttagagctcaagaaatacttgatgtcaaggagtcgagaatcagggctcgactatgttctccctacttggactaatgatacaaagagtgattgctgccagtgggatggcattaaatgcaatcgtacaagcgggcgggttatcgagctttctgttggtgatatgtacttcaaagagagctctcctttaaatctttctttgctccatccctttgaagaagttcgaagtctgaacttatctacggaaggatacaacgaattcaatggcttctttgatgacgtagaaggtataccacacttaacatcacaaattcatgaatttcatttgcatgtagtgtgagctatcttatttttttgtatacttatgatttttcgtttgcaggttatagaagtttaagtggattacgaaacttgaagatcatggatctctcaacgaattatttcaactacagcacatttccttttcttaatgccgctacatcacttacaactcttattctcacgtataacgaaatggatggcccttttcctatcaaaggtgtatttttcgattcctaacgagaggcctatggagcacaaccaagttttagttccaattagtcttatattctattggattatctttcaggactaaaagacttgacaaacttggaactgctggatttgagagcaaacaaactaaacggctccatgcaaggtagcgtctacgtcaattaattggaactttaaacaaatttaactgagtactttattatataattggtttatataatacttgtgtatgccttctcatatcaacacaaattaattattagaggtgtcttactctgtgtctctttgtcttatggcagagttaattcatctgaaaaagctgaaagctctagatctaagctccaataaattttctagctcaatggaattgcaaggcaagctcgctttctttttagaagttattattactattatatgaatatagatgaatatactttatctatataacaataataatcattttgtaaagtacaatctttggtctttaaatatttcagaactacagaatttgattaacttggaagtcttgggtcttgctcagaatcatgtagacggacctataccaatagaaggtgatctttatttgcttcaaagtaaaaattatgtatgagaagtgtctactgacttctagtgaggaagacaactttattctcatattatttttgtttccaaactctctgtttttgcagtattctgtaaactgaagaatctgcgggatctcgatctcaaaggaaatcattttgtaggtcaaatacctctttgtttaggtagcttgaagaagctacgggttcttgatctctcatccaaccaattaagtggagatctaccatctagtttcagtagtcttgagtctctcgaatatctatcattgtcggataacaatttcgatggctcattctcactcaatccactcaccaaccttacaaacctcaagttgttcaaactttcatcaagatcacatacaatacaagtcaagatggagagtacttggcagccaaattttcaactgagtgttgttgtactacggttttgcagcttggagaaaatcccttcctttctcttgtaccagaaaaaattgcgtctagttgatctatccagcaacaatttatctggaaatattcctacgtggctgctgacgaataatccagaacttgaagtcctacagctgcagaataattcatttaccatctttccaattcctacaatggtgcataatttgcagatctttgatttttcagcaaataatatcgggaagttccctgataagatggaccatgcactaccgaatctggtacgtttaaatggctcgaataatgggttccaaggttattttccaacgtctattggtgaaatgaagaatatttcattcttggacctgtcttataataacttctctgggaagttacctagaagctttgtcacaggttgtgtttcaataatgttcctgaagctctctcacaacaaatttagcggccgttttcttccaagagaaacaaacttcccttcacttgacgtgttgagaatggataacaacttgtttacggggaacatcggaggtggtttgagtaactccactatgttgcggattctagacatgtccaacaatgggctctctggtgctattccaagatggttatttgagtttccttatttggattacgtattgatatccaacaatttcttagaaggtacgatacctccttctttgttgggaatgccttttctttcgtttctagacctttctggaaaccaattttctggagccttaccgtcacatgttgatagcgagctcgggatatatatgttcctacacaacaacaacttcacagggccaattccagacacattgttgaaaagtgtccagatacttgatctgcggaacaataaactctctgggagtatcccgcagtttgacgatacacagagcataaacattcttttgttgaagggaaacaatttaacagggtctattccacgggagctttgtgatttgagcaacgtcagacttctagatctttcagacaacaagctcaatggtgtcataccttcatgcctctctaatttgtcatttggacgcttacaagaggacgcaatggctctcaatattccgccctctttcttgcaaacaagccttgagatggaattatacaaatcaacttttttggtagataagattgaagtggaccgctctacttatcaagaaactgaaatcaaatttgccgcaaagcaaaggtatgattcttatagtggaagatctgagttcagcgaaggaattcttcgtcttatgtatgggatggatttgtcaaacaatgaattaagtggtgttatcccgacagagcttggagatctcttgaaactacgaaccttgaatctatctcacaattccttgttgggatctataccatccagcttctccaaactgatagatgttgagagccttgatctttctcataacatgttgcagggaagcattcctcagctactcagcagccttacctctcttgctgtgttcgacgtgtcttccaacaatttatcaggaatcattccccaaggaaggcagtttaacacctttgaagaggagagctacttaggaaatcctctgctttgtggaccaccgaccagtagaagttgtgagactaataagagtccagaggaagcagataatggacaagaagaagaagacgataaagctgctattgatatgatggttttctattttagtactgcttcaatttatgtgaccgcattgataggcgttcttgtacttatgtgctttgattgtccttggcgtcgagcatggctccgcattgtggatgctttcatcgcctcagctaaacatgtgttgccttagatctgttgagcttagttcttggatatttcagtgaaattttgtttatgtatggtttgagtgtttttgtagtgtaatttacgatgccttttcacttatgaatagttgtgtctctttatctcaattttttgttaaaatatttaaggttttttttgtctttttattgaatcttttttttattgaaatatttacggattttttaaaaggttttgtcctcttattacatgtcttttgcacttttgaacggttgtgtctttttaatgcaattttttgttgatatatttataaattctttcgaatgtatctttctatcgtatctttttgttgaaatgtttacgattattttttacaatcgtatattttcagtttacgtttgtgtctttatagttgtatctaatcatttaaagttatgtctcttcattatattttattgcatttactcgtcacaatttctcgtatgagtagttgtctatctaaatgtttgtgacttttgaactttatatatttgtcactttctaagtgaatcccaaatttttgttcttttacacaaatttgttttattataaatccaaactaattaatctgtaaagtagctccaagttctttactctctaaactatttttaaacatacattatttcaatattaaagaaattcctctaatttttgatctaaaaaaaataaaaaattggcatcttcgttagaatttttatacttttttaaagttgattaaaaattcttcatttctatgatcattccaaaatttgatttagaatatataatttttaatgaactttaaattttagattgcaatgtattttgatttattgttaaaaaaaactttttaaaaaaaaattatcttagtttatgacttttcgtttcatatttgtttattacaaacttttttgaaataattttctccgcgatgtcgccggggtctgcgtcctagttattagtacaatggaatcaaactaatgtaaaactgtgaacttgacggaaaaaaaaaaaaaatactgtgaacagcaaagggaaaaaaaaaaaagaaaaaaaatgtcagaacaaatccttctcctccattgagacagtgtacttctgcttcaatggacatttgatatcatcaaatcctgcgtcaggtgagaaagacgcttcgccgttgtcagagttccttttctttattctctgtagaaactagaggcaaaaaatgtcggaagttttcatgaatctgagtaacttgtatctgcttctgtttacatgtttctttggtccgtagatcgaagtagaactgtcacttacagtttaagactagtaagctcattactaaacaactgtattaacaagatttaggcttctttttttattagaatgtttagatttgcttctaattcagatgtaattttagtttattcaatctcaagaaccagacgatgagttatttacatgaaagataggcttaattaggttgtttctattggcctaagtgaaatgtgtgcctcctatgttgggtgttttaactaatgctgattgatatgtcatatgttgactgattatgttactgtgtttgtagtttacgaatggactctgaaagcgtcgtagctgctgacggtgcggattgtgctattgcaaatggtgaagtgacaatggaaggagacagtagtaatggaaatggtggtacttcagagaatttggaatgttgttctactcagcatcctatggaggcatctgaggttggtgacaaagaattttaacgtttttttttttttgccttttctgcacaaataattgttattgactttgcagttttttcgctttttccagggcacacagaatgaacaagtggatgattcaaaacagatgagaggacaaaaggtgcaaggaagggtcaagcatgagaagacctctggaggcaagaatattccatcagtcttggtgaagaagaaaaaagatgggaaagtggtggcatcaaatggttctgttgctccaaacgtaaagcctgtaaagtctcctaagagcaaatcgctcaatggtagagaggctcatgtcacgaaggttactaatctctttgttgctcctatagttactggtgattagccatgtgtcttcttggctgaatgttgtctctgatctcttcatttgttcttatcagcatgggaaccatgactctctaccagctgaagggaccaggtaccaatatcattctttaaaacatggtttctgttttgcatcagttcattgccaaaactctaaaacgattaatgcaaacattccatcaagattatgtattagttcctgtcgttaagtctggtagtttgtttctctctttgatacagggacaagccaaaactgagggaaacaaggaaacaagtcaatgatacatctgaagatgatacacagtagtatgtctttttgggattcactcttcattctcatttccttagcacttttttctgactaaaacttgcttactgtttagtagtccaaaagaagatgatggcaaacctcgtcgagctagtgcacttccaaattatggattcagttttagatgtgaccaacgagctgaaaaaagaagagaggtttcatttacttcactgtacttatcctcacaacaaacatgcaaccaagtatcatatttctctgtcatgtgatgcagttctattcaaagcttgaggaaaagatccatgcgaaagaagaagaaaagaataccgtacaagctaagtccaaggttgtgttctatgccctcttgtttttcttaaaatgtcctattattcatttaaagtgtctatatgctcagtcttctactgtaaatatcatctggaatacttgcaggaaactcaagaagctgagcttaagatgctaaggaagagtctgaacttcaaagccacacctatgcctaccttctatcaagaacctcagctacctaaaacagagttaaagaaggtacatctctgcaattaaagaaggtactttctcattttctctcatgtcgtaagtacatagtatcatgtgaaatgctatatacttgtagatagcgataacaagaccaaaatctccaaaactcgggcggaagaagaccaattctcgagcagattctgaagaagccattactattcaaacccctcgctttggtaggttgagcttagatgagaaaactcctaaagataacccggttgttgaaggaagtgtacccggtgagaccaagaagccaccagtgcgcaagtcacttcccaggttgccttcagaaaagacaaatctgtccaacgggaaggtggctccagcaaaagctgtaacagcctcaacaaaggcaaagtcggaaagaaagaaaccagataaagatgtggatgacctaagccagtcaagtcctgtagacgacaatgctgacccagaagattcacaagaacaagctccaagagtgaatgaagacagaaacgaatctcacatggtagtggaagtggttgcggttgagccttaaaacctacggtatgattcatgtactagttaaggagcgaaaaaggaacagtaacaagaaacagtgaaaaatggatgaaatcaaactgtttaatcagaagatggacaaaaagagtgaaagacagagatgcaaaattgatggtgtgctccacaaggttgcttctatatgtcattcatgagagcttcaattgcgtcgcatgatgtttggtcgtaatgcttaaattctgtttggtttgtcgtcaagatctgttttttcatttcgatatgttatacttaaaaggtgaattttggggtggaaaaaaatgggggccacagcagatgtttcatcctgctgtgtccagggctgagcccaactacacaagccagtcttgcgttgtttaaacccacaatgctgtcaagactctcagttcaacggtgacaatgtttgacaaaaggaaacactaaataacataaaagaaatttgacataatatttttgtttaaatagttggtacaatacaatcaatctaaaccattgtttaacaacaattaaattagttacgattttaaccagaaaatggtgaaatagattcagttccattagaacatttgttccatgtttcgttagttttgatcatcgcgttagaactaaaacggttgagttgatagaattgaaaaaacattttcatccattctgtgtagcattttctgccacctttcactagcacccgacaacaatctttcgaaaaacttttgttccgagaaaatacgtctcttatttcaatgttacattcatttccaccagctcccatttttactgcgcaatcaagaagatatttgagatgttttcttggttgtccacggataacattgagattataatcacccgggctcggccaatgtttaagcaccacatcaaactcgttgattagcatctcctcaagatcggctgctatggccaaacttggattaaaatatgatagcaaaaccatgattgaaaacaatgccaagaaaatggttttattttccattttttatttctctttagtactttttaatgtgttttttcttttgttatattgtcataattaggatttgtgtgttgtatttatagtgataggctgatagactgttcattaatgttattagtaactctttattaataaagaaaattattaaaacaaaaataatacttaagaaaataacatttctgtttgtttatttcttatcaacaagatattcttaattatcaacaaaattaatatgtttaaacgttatacttctttcatagatgtggttagtttaatatatttcagtttataaaaatatgaaataaattgaataaaatcataaaaacttatcgtataacataattgtgctttgagaattaggcataatctataaggccgtgagttttcgatgactagtaacccatcaagacgagcagtccaggattgaagacatgaatccaaatagaggctttgaaccataccactttacaccaagtttgaggttaatccgtttttacataacacaaattagtcatttagatttatctaaatttctaattattaattaatctcgaaattattgcatattcaaacttttctttagatgcttgggaactgtgactctacacttgagaatatggtcaaggttatgtgaacaagacgcgcaattcacaatgattctttgtcttcactttaagggttcataatttggaaatctggcccatcttcataattaattaagattagtccacaataacaataatagcgacaacgaatactaacaataatgactctttttccacttttgtttaatcccactcaaatcatatcgtatcgagaaaaaaatcatagctggccagattcttcccctctaccacattcattgaatatcacattcactttttgattggacacaaacaaacgtaaattaaaagtcaaaactcaggttcacacaatctgattctctgtcccacacatgaatagtcttaaaggtgtaatatctcagatctcaaaggattattccataaaagagaaagagatgtaaactttgtaatatacaacgaaatgagaattttattcaatactcattaaaccatcccaaagggcattacataatttagtacagtgttcatacagattgtaatacagtgcctggaaaaaaaacgagggctctggcaaaaaaaaaaacccaaaaaaaactctttaatagagttgttgcaacaaaagccagagcaaacctctgagagaaccaaggcctgaaccaaacctgaacccgtacatatcatacaaaacccttccgaggaaaaccaaacccaacaaagacaaacgacggggataaaatagataactggctcgtaaaagacaccaaagcagcaagaaacaggagatgataaaccctaaaatctcgtctacccggtaaatatattctcaagcaacacacaaccttccgatttcgagataagttagagtttccttgataaaaaggaaaccctgcaaaaaaaccattgactggaaaaaaagaaaccggaagcgaactgcttggaaaaaagaaggaaaaccgggtaccgagcctagcgagagggacgcgtagatcacagagcctgaaaaagagttgagacttgataaacgaacttggacggactaaaataccttacattataagtggagaggtcgacagtggaattgttgatcaggagaggatgtcacatttgtaaagacgctcgactaagaagtcgacagtggaattggaaatggatcgacactgttggaggtttaatcccaatagagtggaacccaacccgacgatggctggcaagctcttgtctgtaaccatagagcaacctgcaactgataggatctgcagtttgagcttatcagaggaggccaatgcttgaatccctgaatctgagattgcgcatttcgaaatatccaaatcactgagaatctggcagtttgctgcaatggagaccaggctggcgtcagtgatattggaacatccatcgatgtttaagacttcaagagtccacccgttacgagcagtgatggcagagatcactctatcagtcaaattggaacaaccactgaagttgatcttcacaagagagctctgaatcagatgtaggaaaccagactctgttatccccttgagcccacacagatcaatatcctcgagctgagggcacaacttcccgatggctgcaagatttgcatcaccaaagccagggcagttacgaatagacaaagagcgcagagcgctgcaatgagatgaagcaggcaatcctgtggtgagatctctaatactcaaacagttcaccagagagaaagccttcaacttttcaccacagttcaaaagggaaccaaaaaacccaaattgggtaaccctgtggcattcttcaagctgaagactctcaagtgataaagaagcttttgcaaaagagaccaacccgttgtcagataacaaaggggatttactgatgatcgcctttttcatgttcgggcagccctttccaacagattcaagccccatgtcagtcactccttggcaggctgtgatggtcagagagtttaatttttgcagcccgacaccatttcccatgacccagaatcccttctcgctcacgtgtgataatccagcgagcacaagatcagtgatcgacaagccgtaatgacccacaacagcaagagacacatcagtgacattcagcatctgaagcttaagttttgccaaggaacaggtggtgttagacagtagagaggcgattccttgatccctgacaagaggacagttcttgatcgagactgacttcagcttggagcaggatcttgcaatggctagcaaaccctcatctccaattcttgaacaagcctccaatgtcagctcagtcaagttggggcagctcttagcaatagctaccaaacccttgtcagtgattgtagagcagcggttcagctcaagcttctcaagttgagcacaaccctcagcaatctccaaaagtccattgtcagtaatggtagaaacgttccacagtgaaagagacccgagagaagggcagctacgaccaatagaccgaagaccaagatctgaaactttagcagagttgctacctcgaatcgacaattttccaagtcccccacgaccagcagttccaacagcaattgctgccaatctaacatctgttgccttcttcccatctaagctcctagacaaacacccttcacaatcatcaccatcttcagttatcttggaaggaacatcaatctccttttgacggatgctacttacaagcgtaagccactgtttggagacaaaagcgcaagcactcctctcttgtggtccagacaaacgcctaaagatctcaaaaagacactcatctggtagcacatcaatggaaactggctttttctcgaaagcactgaagatcgtaggtgcaacaacacgtgatctcttgcttggagggaaataaacatcagcgaaactaccaagcgataacaaaagactagcatcctttgggtttgggtatattgcgccacgacggtaaaaatcattttcacctgtaaaataccaaaggagaaattcttatgagctaaagagatcattgaatcaaaatcagattcagtaaattaacctaatgattctcagatccaatataccaaaacagagaaattgcagataagatctatagctcgtcaacggccaaaactaaaactcagatctatatatatatatatatatatatatatatatctatagatctaggaagaatcaagtcatcggtgaacactatcctataagccaaatcttattcctcgtacgtaaatcacctcaaacacggaaacgtctaaatctaacagagaaataaaaaatttcaatctgataaatcaaattcaaagatgaaaaaaaattcagagatcaggaagcttaccggcaaaactaaagatctgagacatgatttgagctcaaaactcccaggaaaaacgaaaacgcttgatttctcaagcgaaaacccgtgggaaagagcaaaaaagagagatccgacgaagatgaagaagaaaacgaacgaattagctccgattataccaaagagagagatgcacatgaagatcgaggagatagagagcgaagaaaaccctatggatagggcaaaaaaaaaccagagagagagagaggagaggaaggagaaaaaaaacaggaaaacgaaatgatcggtcagtaagaggtcaagatatgagttattatatacttagttgaaatttcacatgcaatgtatctgagctgagaattggggttcgtatttaatttcgtttattttattcccacaacacacaaaagaaagaagttgcttaagatagaccagttttttttcacctttgagagcgcgttaaggcaagttatgaggtgtttggttaccgagtttagttatagtattaaattgtttttgtttggttcctggaacaaccttactctttttgctacgtttgtggccgacgtcagcatcgtttatgttgtgtgttttttttcttgggagttttgagctgaaatcatgtgtgttgtaacttgtaagtactcataaacgtactaatgatcccaattgggtacgcaagatcatgcctagttctatacttcacataaatgagacttccaacaacatctatcttatgaatgtggtcaagttgtttccccggcccacaaaaatatgcaaacgcaaaaagtgagtgactctgtgccactttgtccgtccttcttgcaccgggtcgaccacaatctccttaagtgtgttaaagaggtgttggcggaaagtaaaatgtaacgcaagaaaaaaccataatcatgctaaactagttggatcctaaactactccaactctcttttgtttccgattaatccaaatctcatggatatcaaaagaaaaagggaaaaatgataatgataatccgatatgaaaaaatttacaaaagtaaacgcaacaaaaattataaccgagactttttataaagttttactgatagtttagagatgcgttaaggcaacaactccattttacaaaaccataacttacttgaaatctaatccccaaatacccaacatactgatgtttctatagtctcgtgcacattaatatacgagaacagtcgttccaacacaaatggtaacacgataatcaacttattaccgactgatgacaaattttgtattattttcttcatcttatttcgatatcttcaaaatcccccatgtgggaaatcaaaattgagatagaaaaaatcagatttgatgaacatacaaattcttctacgattgaatcaccaatacaataatctcctacaccagcatcaggacttagaaggttccttggtacatatcatgattccatattcaaccttctacctgtaaaaaagatggtcaaatcgtaaatgattaaaattggaatctgaatgtatctgtggagaggacccattgcccattataaacatgttattaaaagagaaagtgaacaaaagacacccaagtggtcgtggaagcattatatatccttttcattgcttacacagcccatgttcttattattgcaattcttcatgtctcaatatcaactagctcattattttattgttaaaaagtcacattaaaatcgtttaggcttttagtaatatacgatttttatgcttccttttcttatgataaaattcaaattaatttcaagatagagaccatcgttgaaacaaaccaaaatttggtacaatttcagtttggaatcttgttttagtcaaaagtatctatacttttttaaaatatgtcgattttagatcaagatttttttttattttttttttggcgcgatttttgtattcagattcatttatcggatatagaaaacatggattcatttaaactctattttcgaaatgatgcgatttttggattgaatatttcggttccgatcagattaaacacccctagtccctagaggagaaaatgatcttctctctttctgactgcatgcgtctattgatatttttgttacatgtttaattattttgtcacgaaaattgttatagatctccgtaccaacgtttaccatgtatatgtccttcagtcattgaacattggatgggttcaaaatattattcagtaggttttgttttaaaggaaagaatagtgaaagtgagaaacaaattaataaactatacagtgctcaactaattttagaattcttgatcaaaaagcagcgacaactttaaactaactataacctactgtaagagtctagacgaggttcatgcatattgagttagtgccaccatgaagctatgacaaaattacgataaactaaataattaatgatccagttgattatggagttagtgggccggttccgcaaaaacatgccacaattatgtaaattgtatgtttaatacacaatttgtggaaatagttaactaatataatcagagaaagtccttacccaaaaaaaacaaaaaaaaaaacagagaaagttaacgagaaatattttatttgctaatctaatcacaaatacggagtatttgttttgttttggtcataattagattataccggatcaacgcgtaaggagtattatattttggacttgagatattgacaaagaccaagtcgaattcgtgtcgtttgggacttggctctttagcaagacctttcttgtgttctgttttagctaattgggatgaactgaaggtattgactagtacaacgtttttctagctgattcctctagtatattgaccaattgggatgaactgatcataatcacgtgaaaaggcataagagtctcatgttacgacccaagacattagcattttatgtgtggaaattataagtttattattttatttcctctcttagtgtaattttttcataaaaaatttgtaaaaagtttcagaaagactagtgttgagatttggtgctcttgattaactcgtgaagacgaattgattcaatacgcatactatctatctcgaatatcatcactctttaaatgaacacaaacataaacagaaaagatcacaagccaattaagagtgcaaccacctaacctaaccagtggcggatccaggaatttttttagcataaggcacatattaaatataataaataactaatagtattaatctttttttttttgcaacatcacaaccatccattaattattttagttacttaataagaacttctcatctgaatgcatatattattggagaatgaaagaaaccaacgtaaatattttcattaattaatagtatgtaagtatatgtatgtaaaaaatgtgtagaaaaaaggaaaaaagcaagcaagtgtaaggcatcgaccacccgaccacccttataatctagtgtaaggttgccaattgagctaaaagagtaacaataaccaatagttactaaatagttgttcataatcagtgtggggcacgtgccccaccctcttatacactagatccgcccctgaacctaacagtcactgacttagaagtacgaagcttacatgtacacttgtgaatggagactttccgatctcattgcataaatgacagtgatgttctggttttataataaatcaagtattcaaccgaatagacaagaggaaatacaacaatgccattatctctaacatttctcgtcaaaaaacttgtcacccggggttgttttccggaagaccatttaactcttaagtcttaagtggtcgcgcaaaagagacggtacaaaaagaaatgtaacaatagagcattgtatatgacatatttagagtaatttaagtgtttgtatgtatatgttctctacaatgttagagaaatattctcagatctaatgcaaccctagcatcattatcatcaacttcatgacatgcaactttttctttaaaaaatgtagtcgtccacggtttctcaagacattgtacactttaacaaatcattttttgcagagtggtcatgtaccttttgagaaaatgtacttgagctacaagcctacaacacatcgttaatgaatttttcagtgagttctttagaaagtcccatgactgtatcaacacctcccaccacggaatcaataaaaggtgaaataaggggatgctcaagcatcaaacctccagcaaccttgaaagttattgcatcatcaataagatcatcgatgacatgttctggtatctcatggaaataaacctctgctttgtcccatcctattcttccaactccagttttcaagtttctcacaaaaacagattgcacaacgccaccgtgtgaccccgaatagcctttgataaactcgcgagcttcttctttactagttggttattctctaataacacctttgtacacaacaacagtatctgcagtaatcaatagagttggttgagaatcttgtgtaaactggttttcacctcctaatttcaatataatctcatttgcttttgcttcagcaatagtcacaaccaaatcttcaggcttctctttcctaatagctttctcatcaatatctgcagttacaatagtgaaatcatatcccatttcagccagaatctgctttctcgccatcgactgagaacctagaatcagcttatatccgttctccatcgccttctttgccattctcgtgttgtactgtaagcggaaagagtaaagaagaaaaatcaacaaacaaaaagaagattgaacaaagaatgttgccatcttgtaacttcaaaattttgtatagcgtacattatccaacaacaagatgtcacatactataattatattgtcatcataatatagaatgctaattaatcaatagagaacaatagattactcttatctgtcagcagaacaatatcatttctaataaccattaactgtctgtaattaatggtattctgtttctcctattagctattacaccaaacctggcacacagtggacaagtcctctccatggtagtctaagagaaagattataaaccttgaggccataaacaaagaaagtagaaaattttccatgggctatcagataaattactagcaaaagcttccactaaaaccatcacacttggctaaaagctaaaatgttaacgtttgacacatctacagattttgataagtgtagtcctaaattgttcgttgatttcatacgtataaacacaatagaagaaacacgtttcttccagaagaagtaagaaaactctaaatatgcaaactacacaaggaacagaacaatcagaaaagcaaaaacaaaatgcatttacagtgaagaaattaatatgtgaagattccattagacgcgtcaatggacaaacagttcatgatgctaattgtacatatatatgatatatcaatgatccaataaaaactgctgaggcaaaactctaggaacagagaattagggttttgagattcagcagattcaaactcaccaaaagagattccttaattataggtaaacatacgattttcgaatgtagaagaagattgatacgagggaatgaagctggaacgagagctggagagaaaacaacagatggctgtaattttgcctcctcaagtttcctggtgttcggcctcgtttgccgattagtttggtttggcccatttctttatttcggttatcatctgtatttgggccttagcctttgtttttgtattcattaaaaatcaaaacgaataataagtctaatattaaaaaaggttattattattttagatatcataataatttaatacataatcacaaacaaatattattttataatataacacgtaaatacaaaaatttgttaaaaatgagttctctgcaatatcgggttcttaacccagtataattagtaatacaaatatgaaaataaggaatataaaatgatcttttaaaatcatatggcgaattggctattgaagacttttcaccaaataatacaacaaaaacttcgagactcataaaataagtgatccaactaagtcgtcgatgactataagcttttaagtctctcgctagactgtccacagatttcttcatcttctttgtctcttagcctttctatattatccaccatatctttaaatttcttttataatttgctgtatagcctatataaatgcataaccatgagtgacactaataagcaaaataagagggaatattaagatgacatctactatggttctattcctccttcttcttcttgtgtttccgcatatggataaagccctaggcgcacacgaggaatcccagaaacaaggttagtcttttggtattttagatgttccgaggtcattagtatcattttacgttattaattagttgtgtttaatcctgattttggtttgaattttggaatttctcctcatttgaatagacaaatgagcacaaagatgatcaaacattgacactgtaatatataatgtaatgcttttcgggtggtgtaggtgcagaaaagacttaccatgatgcacgctttactattcctattaagccaaaatatattcctaaggttatacgccctacgccaaaagatccgcctattccggaatgtcttcgaaaaggcacatgtagtcgtcttcatttatctcctcctccgccccagaggtctttcaaaggcacaaacgaacctggtcattgacctcaatctagcttcgaatgcgtgtgtgtgtgcatgtttcttacattgtggtttggtttgtggcttctgtctttgtttacctatgcatgtgtttgtcatattttatagtttgtcgaacggccgctataataaataaaacttgtatttccttttgtgttataaaacgcctcttaattacttacgttggatcgtttaaactcagacatgctaaaccacaaaggccattatcctatatataaaagatgtggtgtctctcgagcgatgacacacatcaccataattaaatcatgcattaactctttcttctatgaaaataacatgtttccatttattaattaatttatttagatttaatttagttacaaaagtatatcaaacacataaatttagatcaaaaacccaaggacactgatctaacttgttttttaggttttaaaattttggacgtaagtttcaaataaaacattggattgggatttaggtttataatccactcgcaatgacatatgagcattttttaaaaaggggtggttcagtctcgatcggtccaaatagacaggttttgatatttcggagggctgaaacaatttttttttaaacaggatttatttgattaattataaaaattataaatattattttgttatagctaaaaaaacaaagttgggattttaaaaaaaatatcatcttcttaacacttttatatatgtatattataagataaaggttaaaatataagatatttgttggtgcagtagaaagaaaaaaaaaatgtgcaaataaaattaatttttgtttttttagagaaatgattattggtaagtaaataaattaatactcttattttgggcctttcgggacttatttttttactattcgagggtcctaagtcatttggctgccgacctgctaaatatgggaaaggatcctcccttcttatttctcatcatactaatctcataagatataaaatttactcactcaatgatttgtgtccatatatactaagttgtttgcaatttagacttattcaaagtattcacgaaatacgaactcataatgtcgaaaagtaaaaatcaaaatattgataatgctagacaacataaatcaacacatggctaccaacaaaaaaaaaaaagacctatatggatattattaaaaaataacaaatatattgtgtcacgacaaataatttcaatacatacatacaatttaacaaagttgcattaaaaaaaaaacccagtggtttggcgcgagtttcgccctagtatacctaatttgtatagcatctaagtaaattttccttattaatatgaaaattttgacaaaaaaaaaaacagagggctataattttgggcatattaattactaattttggtcattattaatatttttggaaaaaattttatccaacataggatagtttatatagccaaagtattttgtttattttcaaaatcttttttttttttttttcaaaatctcattaatataaaactcaaataaagttatataaactgacaatattaattgttaacagtaaaaaagaaaagaaaaatggaagaaccgcacataacaagttagaaacactaaaaaatatatgtacagatcattcattttgtcacaaaactgaacaacatgtggttcatataatttttttatatttaaatataagaaacaagcttttgttaataaaatgacgaatggagaagaagaatatacggttcctccacattagcaatagaaccatactgtctccactcttccattgaaggtaaaaaaatgtaatgggctctctctctaaagaacggtttttctggcagagttccgtctaagtttccagttgaatccggctttggtatctggcttatgacacgactaattcagtatcttatttttgttatttatatgaataatgtccacggttttaattatggggatgccactttatacggtgattcgtttaggtgaaggttttacttctgcttgtactattgggtccgcggttgataaatactatcagatatgattgcatacttgcatgtaactgataaaaataatatttgttactttacgtattttgaattaccaattagcctgtatttcaagtaaccagaactactagttactaagcaagcagttgtgcacttattagatcataataataataagtactcaataactaaaatcaccttaaaacggaaattaaaaaaatgatcgactttgatgttatcatatccgccacttttgtttcgttctctcgggctgaatcgtttgtttcgttctctctatcgttactagctctctgtttcttgttttgtctctattcattaactttgcttcccttattagtaattataatttataaattctaaatgatgtctctgtaaaagagaaacaaagtagataaatattaagggagaaatgtaaatgtaactgcataatcggtttgctacaaacttatttttccctcctaaaatgtttcttttctttctttgcaaaagattcattcgctatatgcctgtattggttaaacattagtagaagtatttttgcaattggcgtgcagaacatgggaagttagtagctactttatatatggccacatgacttcctcgcacgtcacgtaatcggtgaaatgctgtccatgtgacagtcagactcttcgtaaaacaaatgttccgaaagtagtaactacggataatttatttatttttgcaaacgttactgtagttacaaaataaataatgttcctttgtaactttggcgtgggatttccaaaaagtctcttgtcacatgaaacggttttgaaaaatttataatctcactttgaatttggtatatgtattcagacgaatgataagataccaaattattttagtcgttttaatttatagatttattactaacttttttttttgtaaatttaaactttcagattaggcaacaccaaataaatgatatatttaatagaaaatgtatggtcgaaaaaaaatattgtaatgtctctacaccagaagcttttgttttgacttttgagtgtttgaatcatttgaagttttgaacagaataattccacaatcaaaaccaaataatattttatcaggcgagcgaaagacaagattttgacaggtatttgtacaagtactgagtcggtcaacaaaccccgtctggactctggacccgaagtaacccaacaaacgttgcgacaactacattagcaccaccaccaaggcaccaataatgcaacgtaagagggacgcagcaaaactgtcgcgatgtgagattcacgcgctctaatttaaacgttgactctttgtttcatcgttactctctcccatttatttacttcgcatactctcttcgttacaagtttccatttaattactcttaagtctctaactaatagctttagggattcgtcattaatttaaggcaacgtaaacttaaagagtttcgactaaaagccgtttcaggaaacatacatcatcacatactttatctaaataactggcttattaattttataacaaaaatgacgttatttagtgttaagatatacaaatatttaatttttactaaattagttaaggtaaaattgtgttcctttctgtgagttttccgcaatattaaaaaaccctagagaaattaacaaaacgtaattgactaaaaaaagagttcaaaacaaaacatttgttacatttatttcataatttaaagactaagtataaatccactagaaaacagatgattaaaaatgcgggtcccacaatacgccaatcgtcaaataatcgcgcaccttttcgccacgtagcataacaaagtcacgtaagcccttcctctacattacaagaccaaactcaaagtctctttctcccccaaacccaaaaacattgacccaaagagagagagacttctatcgtgcgcacctctctctcttaatcctttatcctgcgcaccaccaccaccatcttcttctccggcgaaaacaaacccaccgccatggggaaaggtcgtgcactttccgacggagtgatcaaaaagatcatcctttcatacacctatgtcgcaatctggatcttcctcagcttcacagtcatcgtctacaacaaatacatcctcgacaagaagatgtataattggccattcccaataactctcaccatgatccacatgggtttttgctcttccttagctgtgattctcatcaaagtcttcaaagtcgtcgagcctgtttcaatgtcacgcgagacttatctcagatccgtcgtaccaatcggcgcgttgtactcactttctctctggttatcaaactctgcttacatctacctctctgtttccttcattcaaatgctcaaagccctaatgcctgtagcagtttactcaatcggggttttgttgaagaaagagactttcaaatctcagactatgactaacatgctttcgatctcgtttggtgttgctattgctgcttatggtgaagctaagtttgatggttggggtgtttttcttcagcttggtgctgttgcttttgaagccactaggttggttttgattcagatcttgcttacttctaaaggaatcaatctaaatccaatcacttctctctattacgttgctccttgttgtttggttttcctctctgttccttggatctttgtggagtttccagttcttagagatacttcgagtttccatttcgatttcgtgatctttggaaccaattctgtttgtgcgtttgctttgaatcttgctgtgttcttgctcgttgggaaaacctctgctttgactatgaatgtggctggtgtggttaaggattggctcttgattgcattctcgtggtcggtgattaaggacacggtcacacctatcaatctgtttggttatggacttgcctttttgggtgttggatattacaatcactgcaagttacaggcgttgaaggctaaagatgcacagaagaaggttcaggcaagtgatgacgaagctgggaagcttttggaagagagggaaagtgaagctaaacgcaacgaaacccaagattgatctgttctgattcaagaatgcaatttcaggaaataagagcttcaaggttagaatgatttgggaagatggattttgcattttcataggtatgattatcattgtcggtgttcgttcgtctacgttttagttttgcgattatatttttaagttatggctgattatattacatagtgatggatgggtgtttaattagaggttcatgaatcttttgaactccattgtatcttcttcttttgagttgtattttgtttcttacttcctcatgaatctatctttgtgggtaacaattgttttagtagtacttctttatattttttccctccattgagattgttaaatgtcaaattgaaagtcccttttacgtctctctttatccaatgaaaccgttgtatgttggaaggcacaagaagatggtcaacaccaaaaactttttgatattttatgggttatgtaggatcatttagtagcaagatccacaatttaaggaaataaacaaaatacccataccgacgttcccttgcaataatatgacacatgacaccatcatatgaatacaatggtctcatttaacctctacaaatatccttcctttagtctcaacaagtttctgtcctgagtaaagggacaggccaaataggtgttagataccaaactaaaaacattcaaacaggctcacgggttatggatttctcatcagcgaatatttgggaacttttaacacaattcggatctactctcgcttggcataaaagctgttttgttccagaacagaattcataagcatgcattggtgcttggtttgtcactttgtgaaatgtgactttgaatagccatcctacctcttggcagaattgtttttggatttgggttatatcctatcaaattccaaaacttaacaaaccagttttgtttgatttcaactggaatcttataactagctcatagttcctacatatcttttttttgtttgaatctactacatatcaggcagtagtattctagactcggacgaaactttattagtccaaattaggctgcaccaaacgaaatgcagatacatcatacatgtcacggaccggaccacatcgggtttggcagatttggcatcctagttttgacatctctaccaaacccactaaagaaatctacacggacactaataagccaaatcagcaatacgacaaacggtccatattccaccacgtggctctcttatagttcgtcacgtcgacacctattaataccgttctaaattcttctccggaacagtagctaaaccgtgatcgtaaagctagtctccagagaagaaaccacaatcggagtctgaagcaacaaattatgcctaatgtttctcagatctctactgttctacgtctagcgttttcttgtaaaagaagactctccaatggcttacacttcgttgctcgttcctattccacctctgatcctcccaaacaaccatcaggtactttcagaatcttcaattcgttgagaattatgcaattgagattaatgtcgctcctttatcaggtccactgacgaattactctaagttagtggagcaagggaggttacaacatgatccataccaagagaaagttgtttcggcattcgaaaatttgtttggaagattggaacatttcgagaagcaaatggaggattatcatgtaaattgcaaatagtgtaacaatttggttcaattgtttgcatatagatgtgtaacatttcggtgtttaggtgagattagcagagtgggagaagaagagagaggaggaacgaagaaagctaatggtggaagaagctgagaagaaggaagatgatggaatgtgggcatctgtgaataagcagggacaaaagcttttgggaagatgggtattagggtgaggtttttgtcaatggcttctttttttagttgaatatttgtttgttagttttttcaaatggttttgttttctttcgtgtgttttaggcggagacagatgaatgtagaacctggagttggtaaatgggtatcgtaccttaaccgagagagaaaattggactcgattgtcggttctcgtcccgcggtaccaccagctccaaaaggattatatatctatggaaatgtaggatgtggtatgttaatggatgctacattatgatcttaccgtgtagctaatatggttaggtatttaagacaatgtttggtgtgttttcatgtaggcaagactatgttgatggatatgttttatggtgctactgatgggatcattagacatagacaacggtttcactttcatgaggtgagtgagcctttagcggttcttctttcaaattaattcaaactcaatatattttccatttctttctttgtaggctatgctgaagataaatgaacaaatgcacaagtattggaaggagaatggtgctgagaagccaatgcaatatagcatttcgagctggattatgaatcttcctgttgatgaaaaagttaaggaatggctagcaggagaagaattttataagcagcaactccaaatgaaacacattcttccagctgtggctgataagtttctcgttgatcagcaatcgagtaaaaaaggagctagcatcctctgctttgatgagattcaggtaactgtatatatggaattagaaaagaaactatagcatataattcattcttctaagcatatatattgattatgagatagttattaagtgataaaaactaggctcgctaattgcttatcactcaaaaagtcataaagccaattcagtgttctacgagggcttagatgagactggacttgcttagttttggtctcatatgccattgcaaatagtgttcaatcttcccataacttggaatttcttgcatcttctgttacagacagttgatgtatttgctattgtggccttatctggaattatgagcagattgttgactactggaactgttcttgtggccaccagtaaccgagcaccacgggagttgaatcaggtttccttttcttttcctcgttaagccctcttctattttcagcaaagaggtctctttaactgatttcatgaaggacatgtatattgattacacagagtttttgcgctgagccactaattttcttgctaatgttgttggtacaggacggaatgcagaaggagatatttgataagtttatctctaaattggagaaacattgtgaaataatctcaattggaagtgaagtagattaccgccgagttgcagcaaaaaattcggctgaaaatgtgtgaatcacagactctttacatcgtttaatgttgtgttcttttttgcttctgttgacgaaattttaaacgtccatttataggttcactacttatggcctttgaatgatgctgttctggaagaatttgagaaaatgtggcgtcaggtcactgaccagtacggtggagaaataacttcggcgactctcccagtgatgtttggaaggtactaatgatagcaatggtttttcttttttgatgggttaaatcaaaccataatggtctttgttgtgtgtgtatcatcagaacagtggaagttcctgaaagctgtagtggagtggcaaggttcacattcgagtatctatgtggtcgaccggtaggtgcagcagattatatcgcagtggccaaaaactatcatacaatttttatatctgatattccagcaatgagcatggagatacgcgacaaggtataactaaaatcaagatttatggcttttgatgtttgctgattccttcctcttaaggacttttgatgttatcaggcacgtaggtttataacccttgtagatgagttatacaaccatcattgttgtcttgtctcaagcgcggagacagcaattgatgagttgtttcaaggaactgcagagggaacgctctttgacctggaaaggtaagaacacataattgacaatctggtttacggtatgattctgttcaggtttagtgggtttcccggtctttatttctgtttgtttttaggtgaaatttggttcgttttagattcattttgactcagtaatggttttatcatttcgatttggttttggcttaatcattatgattcagtttgatttacatatgccaatccgattacactagaatcagtttttgtttggtatcagctttaaagtaatataaccaataggattataaacacagttcgatatggtatcggcttgatcattttgatttggtttcggcttcatcattttgattcagtttgtttatatgccaatcctttaaattgcaccaagatggtttactttgtgtggttatcacataaaaaacttgcagcttccagtttgagacagagacggaagattcaagattaaggcgagatgtgcttgcagaaggtagcataagtgcagctggctcgccttcttcgatcgtatcaatgctttctggtgaagaggaaatgtttgcttttgctcgagctgtaagtcatttctcagttcctaatattcttttcatccaaaaaactactttggttaattatgttgatcggtgcaggcgtctcggttaattgagatgcagactccgttgtaccttgaaggagttcgtttcttgcatccttacttccatcagcagaagtaatgcacaaataacaaatgaacagttgacttattttgagccattattttttctactgtgattattgttcgagcagaagtgaccaaccaaaagctttggtcttttgcctttatactaaggccattcatgaataaaaatgttattttgtttttgatgttccatcacaaaaacgtctgcactgtgagtaactttttttatagctttttatgtttagactaatcgcatttatcgtaaatcttaaatcacttaaactaataacgcgaatagtaaaacttcacaaatagtcaaataatgcatctgtcataaaactgttttgtagtaacttccactgaacattatttacccaacacatacataatcaaacattagatataaccaacacataatcacaagaccttcttagattaatggggtttactacgtatatatccacacactcatttataaacagggctgaagcataatagttggcagctcactcacccatgaaactgttgctcataaccccagtggtggaaacaaaggggttgattcggacccaaagtaatgagaagatggatgcaagaagtgcagaccagacaatgacaatggtcggagtccggttctgtctgcccaaaagacccttcaagaaagggtaaagatgagcaacaacccaaaaagcaaaaaggagctttcccatgagaggtccccacgattggtagccactgtttattgcataggagacaccggccacaataccgacaaggttgaccagtaagatagtggttggtgggatgagaagagacgtccatttgaagacgtaaagctctgcaaagtctccatcttcatctgaggcttttgatgtgactgtgaagtttgtgtctatccctgcaaaaactttgagtagaccttgaaacactgcaaaaagatgagccgatgttccaccgattacccaaaactgctcgttcctccaccagtcttcaagggccacatcactccatttgagctccaagattgctgatgcgtagatggatgcaaatagcagcatgaaacacaagctcgctaagttacttatctgcaaattaaggacaaaatgaatatatgtaaaaaatgcattttcaaaaaggtgagtagtaaatagatgaaaaatagaacttacctctggtatgatgaacgtgttggttatgaggcaaaaagctggaagcatacaataggcgaggagcgggatggatgtaattggatagactatggtattgatgtaggcaattctctccaaaagtttcaacctcccattatagccataccatatagggcaatgtctactcagaagaatctcgatagaccccaaagcccatcgaagaacttggttcaaacgatcagagagattgatgggtgcggatcccttgaacgcagggcgtgaaggaacacagtagattgatatccaaccccttgcatgcatcttgaatccagtaagaatatcttctgtcacagaaccgtagatccacccgatctaaaagtccaaaatatgaaaagattatcaaatagaaaacaaaagaatggcattgttgtttggacagtctactaaaacctctgacctctttgccccaatcagtcttggcctcataaccacagcttatgacatgaatcgcctccttgagaagagtcaaggggttggttgttgatggaagacctccttgttccatgaaggtagctgcaataaacactggcgactggccaaaacgcttttctagccttttctgggatactagaagagacatctcatcctcatagcctgcaagaacaagaacattcagtgaaattttctttacatgcgcaataatgtgatcacatagaggatgtgacagccagaccttcaacgtcctcgtcaatgtcttccatattgaaaagtggaacgttggagtcacttctcttaatgcttctgttatcttcatagttaggtatttttctactctttcctttcttcctcgagccaaaacagctctttacaattatattaggctcaagatcttcctctgttagaacaggatcatacccatacaaggcctgcctgttgaaacagcagccagtgcccacatacacaggaccttgtataccatctaaccccttcaagttgatctgcacaacatagtacacatctgagttagcttaagtggacaagatatgaccgagaaggaaagtaaaagacactggttgttaatagtagagttaaactcacatcaaagaagacagtattcctgttggcgtatcgatcatgcaagtcaataccatcgaaacgttgtggaaactgcacgtagcaacacttctttccgattgcagggtccatcatgaaacacatggcttccttaatcgccttgctgttgttgaagtaatgatcacaatcaacgttcaaaagatacgccccattagtaagaacagcagaaacacgaatctgtcaaaatgtaagaaatctagatcagaagaaatgcatactcgaaagtaatagactaagaaattccctagagatgtagtcatggcaacacagcttcttgtctaataacacaataaaccgcttccaagccattgaacaaaagagagcacaacagatttacgaaagataaaacgaaccaaggcattcatagctccagccttcttgtggtgctgaaatccaggacgcttttcacgggacacatagatgagcctaggtagctcatttccatcggtatccagacctccactatggcctaagaaaacctgaattgtaacaaaataattagaatcaacaaacattatagataaatatttgcccatctaggagaattactataaaaggaagtgattatactagtgtacctgaatcatcccaggatggtctctagggttgttaccaggccaggacgtaccatcctccattgtccaaccatcttcaggaatcttctgtgctttagcgacgaggatattgatcctcactttaaactcctcatactctctctgccaacgtgggacataagaaaatgtgacattcactctttagtctcgtatatatgtctaatggataaaacaagcagaagctatttatgcaattatagtagtccaagtgaccttcattgcccgtctctctttgacaaaagaaggttggatcttgtccttcaagtaatctatcttctgggaaaaatagaactcaggagctctaggttcaatgttgaatttcttgcaaaaaggtacccatttctttgagaactcagccgtttcagaaagggcttcaaaagttagcatagctgaaccgtcatccgaaacgtaacacgcaactttatccactgggtagtccacagcaaggattgagagaactgtgtttgctgttacaagaggaggctctttcatcgggtccaccgtactaacaaacacatccacgggagctagctgtgatggttcaccatctcgatcgtatctataattaaggattaaaaccaaaaagtcaaatgcaagtaatgtaaaccagatgtagatgatcatcaacttagaaagaccaaccttaaagcaagcctgtcaagaaaagtctccctgttaatgggataccattttgggaactgatcaagaagccaagaaaaggcaaaccagatctcacaaataactgaggtcaaccacagggcatatgcatctttcacgggatgagttgtacgataatgcaagaagactcccaaaatgatgagccggagaactatcactatacgataaggtgtcatgcgagcggatgggaaatgtaccacacggctcataggaagccgagcatcatcaaccctgtaagtacaatatccatcaataaccacaaagcaaacgagtcagaagaccatgtaaccttaaccacaactccaaatgcagaactaaaccaacaaagcttttctaatccaatacttttaacttacatttggagttcgtcaccatttgaccctgtcccttcaaattctcctccctttccttcatggtatttaccagtcatatgtatcatattcttatcctgcttcagcttccaaccttggatcctttttttccagtcaacattcacaagcccataagagttcaagtcttttgatgggtccaagattcttacaggcactgcatatttgtactcaacatgtgaaaatcacaagatatacaatatgttgtggtcaccgaagcaaacacacgaagcaaaagttgatagataccaggtagttgtgggtcaatacaaggagacagagtagcattcctatccggcgtaggaatctctccagaaacctatgtatagaaatcatcaagaaaaattgatgttgtgaaagattttcatcttggaaaatgtcattatactaacgttagacgataattcatatgttagctagtccctaccggatggccatgagtaagaagagaaacaggtaaagattcttcatgtcgagatgacgaagagaactcttcagcgcgatgtgggagtcttgccttgttgtttccctgggtataatcaaactcattctcgatatcattgacatcatcctctttttcatctacttcaactcgaggactccctatacaaaatcaaatgtgtcaaaaaatgaaaataaagaactgataattaatagagaccagctagaagataatagcacataatactactgaccattgtgccgtctgaatctagccttgcattgcgggcaacactgagatccatctttcctctcatactcataacaagactgacacaaaggaaaaccacattcattacaagcgacaaagacattgccagtttttgtgagtccaacatcgtcaccacagatctgacatatctgaccattcagatctttcaagggttttagctgcactttgacgacagaatgaggttagcgagaccaaaaaaaacagaaacagatcatattgcaagaaccatatttaaatgattgcttatctgaattttggctactttcaagcatgttaaagcttttttgcattaaaataacattttaagaacctggttaagttagattgtaatgagtcaatgagtgtaaagctttagcaacgatgaagcaaaacatattaaaaaccgtagatcaagaacctataactgaaattcaccaacattgtcctaaagggataaaactagaagccaaaattggaacaaaaatgaaaaacaacaacatttactcatagatctaaaacatgaacaaaagatataaaaaactttagagacaagaacataactctatgcatagagattgaagtaaacccaaaagcaaaaaaaaaaatctaattttagctgacacattaattctctcagtaagtaaaatcacatagaaaagttcaaaactttttagcttccataagccaaggttggccaaaaaaccaacaaaacaaacagagatatctaaattaacgttacatcaaaccctaaagtcaaaaagaaagaggaaaccaaccccatcatcggaatcgtctctgttccgaacaaactcatatctccggtaagatcccgcaaccatgccggcgttttgctgcaacgcttaagcgcttaaaacgtcttcgtaatgcacactccaaaagaaagatctaacacataaccctaaaaattcgccatcgattcaaatgcggaatttagagagctctttaactacattaagtctacaacaatctatatctactctgtcacagtctcactttgttctcttctcgtaagtgtccattttattgtttacgtttccatatattttcttttcttgcgaattaaatgttcacacgtggaagtcgtcgaccgttctaagtctctgtcagtggccataacgtttgccaccattaccttaaaatcacacaaactcataatttaacaaaacatgccaataaaggaaaactatatagtaagatggaaatatataagatacacgtcacacatagttttaatttttaggttaatacatcaatatatacgagactgatggttcaccgaacgattgtggtattttttttctaaattagaaacttaggatggcttgcttggctgcatctaagatagaatcagtctttaataaataactaagttagtatccatggtttgcacggattaattttttaatttgtctatcaatttcgcttattgatataatactaatttgactaatattgtgtttgtctgtaaatgttaatttatataatttacgaagttaaaagtttatcaatttattattggtatcatttaaatatagtatcaaaatgagtttgtatcgattggagagacagtacaaactggtttacatctacttacctttgatcacgagaaaaaaacaatataaacatattcatagatcttcaaacactttaaaaaaaaaaacattgtgaccatttagttttttcatagttaatacctcagtggcaacaagaacttccatgatgggttgcataggatactcatcaatatcatcttcaatctttggtgcaagttgtctcctacagaacgaaagaacgaatttgttcctcctaatgttattctaacgaaaatactgcataaaaatatttaaggtgtatacaattatagatttaacaaaaataattgtagtggctttgataaaattatattctcgcaaaagcagccagtgcatccaacgttgtatcaacaatgacttggaaaacatcaaatgcatttgaatggctaatagtatttgtacgtatattttaaataaacttcactcgacaattttatatttttacaataatagaatagttgaaaagagtatagttcagttgagttacctttgtaaaaatcgattttcgcaaagcgaatcaaacaaacaacgataccatcaatagattcttggcatgcttgatcaacaatctcaataaactttacctaaagagtacatgccaaactattgtcccttgaaggttcaaaactattacaaacaccagttgttatggagaattgcctccaaacctgaaactacttaacctgaatatgccatgcattccttgtaagacttgagagatttcaagggggtgggggtggggtggggtggggggggggaatggaaaaggattagccaacaatatcattttacttcttttttttgtttcgtatgaggaagaatatgcaatattggtgaatgaattatgcatatgggaaagacgtatttataagagtagaatggctaggtcgaaaatattcttttcggattatgtcttgggaaaatattgtctaaatcacataaatatagggaaatattaagatgattgctttaaacttagtttggcaaatatggaacatgttaagaaacagtttaatgattcgagagattattgaacagaaatattgaggaatattgttaaaatatttgattacttagaattgggtagaagatttaaattcgaatgatataacacaagataattcaaaaaagattgggaatattccttttcgactaagattataaggtatgatctgttcggataaaaataaaatcaacggttaataataaagaaatcagatagccaagattagaacttaggggtttgattgctttatgattcaaaagagttttagtaacttaaaatgtcatgtaaaatctgttgttattaaatcaaaatatcttaaagtatgttaatgttttgtgtttttcatttaagatttataaaaaataatctaaaatctttataaatttgggatgattggattcatactcttataaagtcactaaaagttttgtgttattcaattaaaacaaaaaaatttctaacttttaatgatttaaattattatgttattggttcatgactttctacatttttcttcacaaaagaaagttatagaaagtcatgaaaagtattatccaaatagagagattgtttgaaaaactttacaagattatgaaaaactaatcaacaaaaatataaaaaactatctaacaatagtttaaaatatttcttttatttactttataagatttgaagaaagtcatcaaaatctcttgtaaattaaaaatcaataacactttcttaattaatacaccggttcatcattaatacacacaattattacatgaacgatggctctttctctctctgagggcgattttttgcctaactcacaccgtttcaattctcctcgccggagcagttctccgaccatcataatctgtctcttttcacggttttatgacggcggttactttctgccaatcagtttccatggcagttatcattgcccttcactttcggagggtaactacccacacaaaccgccatggatacaaacttatatatacttcaattcgctccttcttctcccttttctgcaattcaccatttctcaaacactgtcatccacaatcatgagtgacagacttcgtaaatcggttcaggatttgaacttgggtattgatgatgaaccggtggctctaacttcagaattttgttcacaggctgcatatgtgaaccgtttctccttggtggtaacaactgtgaatccacgcaaacagaacctccgtgccttgataggacaaatgccacgagtttggggctttcctgattcgtgcgtcgggcggattattgacaaaggcagagttcaattcaagttccagtctgaggaagcgatgaatctcgtgctccgtcgtggaccgtggtcattcaacgactggatgctttcgattcatcggtggtatccaaaccttagcgaggctgaaatgaagatcattcctttttgggtacaaatcaccggtattcctctccttttccttaccaatgcaatggctagatgtgttggaaatagattaggacatgttgctgatgttgactttgatgagaactcaaaccatacgggttttgtgcgagttcgaatcaattggaatttggatgatcctttacgcttccaaagaaatttccaatttgctgatggtgaaaacactgtgataaagtttcgttttgagcgtttaaggaatttctgtaccaaatgtggctcccttaagcatgacatcaaggtatgcaccctttcctttgataatgaagatccggtggagacaagtgatgatgatgatgctgatgatgatgacgatcatcacgacgacaacaaagaacatgacataagcgacactgatactcttcagacagtggatccagcgactcttattcccggccttcaatcttcgctttcaaaggggaatcaacgccaggtacaaaaactttcagatggttattcggttccatgcgtcattgaggacacagacctcacagttgaaagactccgctaccttcacgccaaacttgcaggagttaaaactgacgcaccggttgagaaagatctgctccttgagtcctctgacaatgcacaaaatgagtttgtcttcatgaagagaaagagggttcgattagaagaaatgtaccaacaggtggaagctgcagatgaaatgggcgttctgagtcaactttgcaagaaaggaagaaagactgaatctgcaggatcgtgttcgatacatgatggacgtgacggaggcgcggggggcccggtacccctaagggatccaatatgaggatcatctcatggaactgtcagggcatcggtatgccgctgactcaatcgcggttgtttcgcttattccgtatgtataactatgatattttatttttagttgaaaccttaaaccagtgtgataaagtatgtaaactagcatatgatttaggcttccctaatgtaataactcagccccctaatggaaggagtggtggcttagctcttatgtggaaaaacaatgtctctttatccttgatttctcaggatgaaagactcattgattctcatgtaacatttaataataagagcttctacttgtcttgtgtgtatggtcaccctactcaatctgaacgtcatcaactatggcaaactcttgaacatatctcagataatcgaaatgctgaatggttgctagtgggtgacttcaatgagatactttcgaacgctgaaaaaattggtggtcccatgagagaggaatggacttttagaaatttcagaaacatggtttctcattgtgacattgaagatatgagatcaaaaggagatagattcagttgggtaggggaaagacatacacacacagtcaaatgttgccttgacagagtttttattaattcagcctggactgcaacatttccatatgctgaaatagaattcctggacttcacgggctctgaccacaaaccggtcctagttcacttcaacgagtcatttccccgtcgatcaaagcttttccgttttgataaccgcttaattgacataccgacattcaaacgtattgttcaaacaagctggaggacaaaccggaattcacgttctacacctatcacggaacggatcagtagttgtcgacaagccatggcaagactgaaacacgcttctaatttaaactcagaacaacgaatcaaaaaacttcaaagcagcctaaacagagcaatggagagtacaaggagggttgacagacaactaattccacaacttcaagagtcactagcgaaggcctttagtgacgaagagatttattggaagcagaagagtcgtaatcaatggatgaaggaaggcgatcaaaacaccggctattttcatgcctgtacaaaaacaagatattctcaaaatcgagtgaacacaatcatggacgatcaaggaaggatgttcacaggagataaagaaattggaaaccacgctcaggacttttttacaaatatctttagcaccaatggtataaaggtatcaccaatagactttgcggacttcaaatccacagtcactaatacagtcaatttagatcttacaaaagagtttagtgacaccgaaatatatgatgctatctgccaaataggagatgataaagccccagggcctgatgggttaacagcaagattttataagaattgttgggatatagtcggatacgatgttatattagaagtcaaaaaattctttgaaacatcatttatgaaacccagcataaatcatactaacatatgtatgattccaaaaatcactaaccctacaacactctccgactatagacctatagcactttgcaatgttttatacaaggtcatctccaaatgcttagtgaatcgtttaaaatctcatctaaactcgattgtttcggattctcaagctgcttttatcccgggtcgaatcattaacgataacgtcatgatagcacatgaggttatgcattcactcaaagtccgaaagcgcgtgtcaaaaacatatatggcagtgaaaacagatgttagcaaagcttatgatagggtggaatgggatttcctggaaacaacaatgcgactctttggtttttgcaacaaatggattgggtggattatggctgcagttaaatcggttcactactcagtcttgattaatggatcaccacatggatatattacaccaacacggggtatacgacaaggagatccgttgtcaccatatttattcatcctatgtggagatattcttagtcacctaataaatggaagagcgtcaagtggagatcttcggggagttcgcattggcaatggagcaccagcaataacccatttacaatttgcagatgattctctatttttctgccaagccaacgtacggaattgccaggctctaaaggatgtgtttgatgtttatgaatactattcgggacagaaaataaatgttcaaaaatcaatgataaccttcggatcgcgggtctatggttcaacacaatcaaggctaaaacaaattctggaaattccaaaccagggtggaggagggaaatacttgggcttacctgagcaatttggtcgtaaaaagaaagaaatgttcgaatatataattgaccgagtaaaaaaacgaacgtcaacatggagtgcacgtttcctctcgccagcaggaaaagagattatgctaaagtcggtcgccctggcaatgcccgtctatgcgatgtcatgcttcaaattacctaaaggtatagtttcggagattgaatcattacttatgaatttttggtgggaaaaagcttcaaaccagcgtggaatcccatgggtagcgtggaagagactccaatactcaaaaaaagaaggcggcctgggctttcgagatctcgcaaaatttaatgatgctttacttgccaagcaagcatggcgtctcatacaatatccaaactccctgtttgcacgtgtcatgaaagcccggtatttcaaagatgtttcaattcttgatgctaaggtaagaaaacaacaatcttatggatgggcatcgcttttagatggcattgcacttttaaaaaaaggaacaagacatttgattggtgatggacagaatattcgtatcggattggataatattgtggactctcatcctcctagaccgttaaatacagaagaaacatataaggagatgacaattaataacttgttcgaacgtaaaggctcctactacttctgggatgattctaaaatttctcaatttgtcgaccaaagcgatcatggattcatacaccgtatctaccttgctaagagtaaaaaaccagacaaaattatttggaattacaatacaacgggagaatatacggttcgttctggctattggctccttactcatgatccgtccacaaacattcccgccataaaccctcctcatggttcgatcgatttgaaaaccagaatctggaatttgccaatcatgccgaaattaaaacacttcctttggcgagccctatctcaagctcttgctacaactgagaggttaactactagaggaatgcgtatagatcctagttgtcctcgttgccatcgggaaaatgaatcgattaaccatgctctctttacttgccctttcgcaacaatggcttggcggttatcagattcgtcactcattcgtaatcaacttatgtcaaacgactttgaagaaaacatctccaatatcttgaactttgtccaggataccacaatgtcagatttccataagcttctcccggtttggctcatatggcgaatatggaaggcaagaaataatgtagtattcaataagttcagagaaagcccgtcaaaaactgttttaagtgcaaaggctgaaacacatgattggctcaatgcaacacaaagccataagaaaacaccatcaccgactcgacaaattgcagagaataaaatagaatggaggaatccacctgccacatatgtaaagtgtaattttgatgctggtttcgatgtacagaagttggaagctacaggaggctggatcatcagaaatcattacgggacaccaatttcatggggttcaatgaagttggctcatacgagtaatccgcttgaggcagaaaccaaagctcttttggcggctttacaacaaacctggattcgaggatacacacaagtattcatggaaggcgattgtcagacgctaattaacttgattaatgggatttcgtttcacagttccttagcaaatcacctggaggacatcagtttttgggcaaataaatttgcaagcattcagtttggttttattaggaaaaagggaaacaaattagctcatgtcttagcgaaatatggttgtacttattctaccttttattctgattctggttctttacctatttggcttgatcgatacttttgtaatgactctaattgattaatataattgttttgacgtaaaaaaaaaaaaaaaaaaacactttcttaatatatgatcgaaacgaaacaagtttaaaagaatctccgtcctttcgaactagttttatttcatgtcatacttttttaatcaatgacatttttgtaaacactaatcaactttcaagatattttaataaatgtaatgttcaaataatagtatagattaataatagtttctttattcataaaaattaaataccttatgtagccattctcctaattttttcttccttttatacataccaaacttttattttctccactaacaaaaagaaacaaattaatattttcttacagtcaacaatataaataatcttttccttaattaataatctttatccttttatcaattaatcaaactggtgtctctttgtaatcagtcccaatatataacacaaacgttcatactaatgaattaactaagcagtcaaaaaaaaaaaaaaaaaaaacgagttgtgaaattagagaagaaaaaaaactcagagcagtgacaaacatcgattcaagagttgtgaagcgccgccgattttcgtagaagataatctgattccaaatttctcttttttgggatcgcttcgctacttctgattccatttcacctcggcaaaaatctggaatctgtaccgtcacagccgaaaattctcttccttcaccgtttcgtttcgctgcttatgtaagattcaatcttcctttgcttatgtatttgttatttatggatactccgatccttggttactactgtgcgtgaatacccacttggagtttaacatacgatactttattgatgaatactttgggaaatctggtgaatttgattgttgttttgagtgatatatgttgaattgttttagaattacgagcaatgtccctggctgatacattttagggtttaggacataactgtttagttcttgtccaattttcatgatattcagacgagtgttagatttctggcaatttaattattagggtttcgttttttatattaatgaattctacaatgcaacatttttgtagatcaaatgattagggtttctggcaatgaaatgttagatttcttgcaatttaattattagggtttcctttttatattaatgaattctgcaatgcagcattttttgtgagtcaagaataaatgtgttgatggagtttaatgacttgttcataagtagtgccattcttgacgtttaggaatcttgagtttatatatcatcttggatgagatttatgcattgattggttaatagtggctttattttggattgcttctgccttcagttctctaatcattattaccctatctgtctggtttatagatttgctttagtttaggtaattaacttccaaatgtatttgcagtgtgcggatttgtcgttggtgctcaattcccctagaatcggtatccagtccatctctcgtgcaacttttatatcagtctctttattgagaagtcgattcggtttccccgagcagtcaggtccctgctcctccattcgtggcattttgtagaggagaatatacattaggagacttccaatggagtttaataaagaagaagctacaagggctagagagattgcaaagaggaagtttttagcaaatgattttgcgggggcgaggaaatttgccttgaaggctcagtttctgtatcctgaactcgatggaattgctcaaatggtggccacttttgatgttcatttatctgcacagaatatcatttatggggatgtagaccactatggtgtacttggtctgaaccctgaggctgatgacgaaatagtgaggaagcgttacagaaagttagctgtaatgcttcatccagacaggaacaagtcagtcggagcagaggaagcctttaagtttctttcacaggcttggggtgtcttctctgacaaggcaaagagagctgactatgacctgaagaggaatgtgggattgtataagggaggaggagcatcatcgtcaaggcctgcaaccaatgggtttcagaaagttactaaagctagcggtaacacaaccaaagtaaagagttcaaagagaggtataaaacgggcaagtgatgcctctgctgccgctactacttctacctcggcccagaaaacaactgctgatgggaccttttggactgtatgccgtacttgcagaacacagtatgaatatcatagtgtttatctaaatcagaacctcctgtgtcccaactgtcgtaagccgtttatagctgtggaaacagatcctccaggttcaggttcgattcgcaagacctttcacgagcaccaattcgactctctccgccatacaacagacggaagaaagaaaaatgtacctggaagagacaacaatggggtgtatggtgaatatgattcctttgagtggggtgtgttcactggaactaaaacttctgctcatgctacaccgaccgggtcacgaaaagatgaggttgtgcgtagagagtataccaaaaggacggctggtccttcatcaacaattcctccaaaaagaagaaaggttatggaaaatgcagttgcgggtggcaacattgcaagttgtcttgctcccaagtccactggtgtaaaagaagtttctgaggacgagctgaagaatttattgaagaagaaagctaaatcagtaatcagcagaaacctgccagagttatgcaccatcgttgctgaaactgaaactaacggaaggggaatggaaactgaggatctcaatggtttcaatgcaggttcttcagtaaacaaaaatgccattgaatcatgctgcatgaatactgacaaggaattgaattcactgggagccttgacattagatgttactgcgccggatttttgtgactttgacaaggatcgaactgaaaagtcagttaaggataaccagatatgggctttttacgattctcatgaaggtctgcctcgatcatatgccttgatacataatgttatctccgtagatccattcaaggtgcgtatgagttggcttactccagtaacaaacggtgagcctagctcaacgaattggcttggttttggtataccaaaaagttgtggaggtttcagagttaggaaaacactaatctacaggtcaccttacagtttctcacacaaagtaaacctggtcaaaggcaatcatggggaattccttatatatcctagaacaggcgatgtctgggctctgtatcggaaatggtcccctgactggaactatcttacaggagtcgaaacagttgagtacgatatagttgaagtagttgaaggatacacagaggaatatggtgtggtagtggttcctctggttaaagttgctggtttcaaagccgtgtttcaccatcatttggattccaaagaaaccaaaaggttccttagggatgaaatttcgagattctctcacaagataccgtcttacttgctgacaggtcaagaagcacccggtgcacccagaggttgcagacagcttgacccggcagcaacaccgtcacagcttcttcaggctatcgatgattatcggtaaggtgtaagattcaaactttttgtattttagtaatgtaatgtaatatgcttaaatatgaactgaatgttttattctagtttatgggtaacatagaagctagaagaacctacagtgcgagttttcgttgtgttttataactaaaaagaggagctctaatgaatctgaatattttcattaaatgcctggcaacaaaaacagtttaaagtgcaatacattaaaaaaaaaacatagactattcagaatttgtttcattactcctcgagcacaattcgactgcatagtgggaaagaattttgctgtcttaaccactcgacgatatatctttgatgaaaccgatgcaaacaatgtggcagtttgtggttatttgattcttgtcattgtcgttccacaaattctccaccgcacattttggaatcacggagaacacctcttgggacaagggaggatcatggagacaggaattgatgagcggaaaagggttagagggacgggaaggagaactgcgtaaagtgacacttccattgatttcgtctattaagcatctccgaaatttggcaagagagaactatgagatgatgaggtttgactgatctttgcattgatgtttactttaccagctgtagtcttcattgtcaacaaattcaagcagagaaacaagagagagatgaaatcgtcagaagaagatgttgagatacaaaaagacaagcgattgttgatattataggtaacatactataatagaaacaaggagactttaaaatttgatttttcattaagtttctactaaaggaaacaaacttaaacgaatctaaattgtttcattattacatgcctaggcagcataagcagtttcaattgcattacattaataaaaacaagggtaagcatagactattcagaatctatatattatatgattgttgactctcttcgagcacaattctacggcagatagggcaagaattacacctccttaaccactcagagatacattctttatgaaatcgatgtgagcaatgtgccaacttttttattctcttaccatcgttgacgtaatcgttcaaaaaattctccaaacatataggacatgtcgattcgtcttctacttcttgagtttcttctttaggaagacaagaaacaggaatcactgagaacacttcttgcgttaaaacgacgttaacgaacatgaacaaccgttgtagaaacccaacgcttaaactcgcttgaccagtgattacctcagcgatatatttggacaaggaaggatcatggagacgagaatcaagaagcggaaagagatgaaacggagtgaatttgtagtttaagagattcaaacggatttgagagatggggagaggaggtcctggatacaatccattaaaagtgatacttccattggatttgtcaatcacatatctcttgaattgttgacggagattgatgatgcaaacagtgttgtttaggctcaagggtaaatatgtggtttgactgaatatcttcgtagtgatagcgaatttcatatctccagtctccattctcaacaaacttaagcagacacaataagagagaaatcgttagatgttgagatgagaagagacaagtgtttgttgatgttattatataagttttgcgctcaatagtaagtttccttttttgtttttggtttcatctacttatttcctttttcatagacttatgttaacgtttatctcttgctatttccttttttgtttgttatcctttccttttctttttgacagaactctgttttttgctgttgtttctatttgccttttctaattcgaactagtcgatttcggtgattgtattgactgtgatttatttgaagaggcaaagaaacaacaagagccttaagtacaatgcctagttttacttgtaccggttttcaaggatcatattattggacctacagataattcctacagacaatttcataggtgattcttcggttttgacagtttattattttgaaaactgaacatatgtactctttatttttctgtagatagatatctttctcacgagtacaacaatttttttaccttaagctgcttgatgatcgcttcatgagagacatgagtattacatacgcagatgcatcatacataggcacattcgttatcttgttccctcataagaagtttctcttcttgctccaccctttgcagccatttcagccctagatcgcaccctgctcttgcagcgatttggaactgttcttttgccatctctaatggattcatctccggattttccaggttctttcttgctctcttgggaggtgaaactcccacgacgttcaattttgttagagattctgggacttgcacacctgtatagttgatatcttaagcaagtaaccttgaaagcaagaaacataacgatattgttgtgttcctaagatctagaaagccaggagtgaccaaaaaacaaatccactttggatagccatgaggatctgatgtaaaagaagcaagataagtctgtgctgaaagaggattactaacctctaagtaaaagagatccatatgctatagcagcaccagcatgtccctgaacgtttacaagaagatgtcagactatggaaactacaagaagataccactttacagactcttacagattttacataaaattttgacataagacaatgcatgtttcgtcgatattcaaaagtagaacatatgatgataactatagcgcagaatttacactaatgaggcagtaatgaaacgaaaacagaagctggctctttgtaaacactgcttcagcggtacagatctacagacaaaataagaaagagcagtatcgccagacatgaagtttattaccttctctgaagccctatggaaacaccatatagctgaatccacatcttgcttcacacagtctcctgtcagatacactattcctaaaagatagagggcacctggatgtagctgcaagttaccaactcaaggtgagattactatgaaatttccgaattatacgttcatacaagtctctgagctgcaaaaatgcattcatacctgatcaacagcattctctatatagtgaaacgcctgttgatccgactggacatgatcattctgaaagaaagattgcaattagtatgaaatgctggggcagtttagtgatgagtgggagacaatcagacagatattaactaagtaaactttcgaattctgaggaaacaaagctgctcatgaaacagacattcctcaactaaagagtagcccactaaagcaacaatgaaactgattaagataaagatgaagctctaaggtatctacatctaatgttctctctaagaagtcggggaaaaccgatattgtaaacattattaacaggcggttacaaggacgaattgtaaggaagcctgacctcgactcttaaacgacaccctagctcatattgagcatctgcattacccatgtctgcagcttcgacaagcaaagcagctcccctgtgatgatcaaagacaataatacatggataagaagacaacaaaaagaaatatgtgactaatgatttacttacacagctttacaagctccaggaacatggtacttcaggtgcaacttggaaagccaatacctagcatgagtgttcaaattatcagcttccagagcaagttcaaagttctctttagctccctataaccagaaaaaaaaatcatatttagaaataaacaccaacgatacaaagcactacattcaaacacttatggcatacataagtgttataccctgaggagaggaataagacgacgatcattgagttcacagtaatcgataactctctctacttctttaatcgcgctccatcctttggctacatactccattgccttctcattcctactgtgtaatcctctctgattcaaaccataaacaccacaaacgtaaatcacagaaccgaaacaaactcatttccaatcgaaatccacaaaaaggaaaatgtcatactcgctgttcgaatccatgaacagtatgatgacaagcaatcttcgattccgcggcgacggcggctgcttgccggagaattaaacgacgaaacatgatttagccggagaagaaacctaaccggagagaattttgaaagaaaccttcaactaggcttagctaaagttgctttttagtccactgtattttattcaagcccatataaagcccattatcataaattacaactttcccctcgagcgtcgatgctaagttctcggtcggattattcaagtttgtcgccgtcaaaacgaaacaccaacacaagttccgaccaaactgggattctgttatcactttggtctctgctcttctgatgtatacgaagttatcattgttccccagaaagagttcttcactactctccatagccaacgagaaaaggatccatcaatttctgaggaatctctgcacggctgttgaaaggttagattttggaaactctaatgattcgtcagaaatgaaccctagagaagggtataatggacgaatccagaaccgaactgggagctctggggaagttagtgaaagtattcacacacaaagtcagagtctgggttcgaatcagggaagaaatgagcagtcatggaagcagagtcctagtttgtctaattctcaagtccaatctcaatatcaaggcaattggtacgggacaaactctgattatcagaatggtgtaggatcgtcttggcattcaggtaagactattgatcgcgaggtatatgacatgattatggaatttgatgaatattgcatacaagagaatgtaagagtggccttaacgactatggaaaaactggagaagaagggttatgttatggattttgttagactcttaaagttaacacagctatgtagggaaggaaatgtttattacgaagtcagtgttttagaagaagccaaggtttctgttctagcgaagatcagagctttagttaacaatttagaagcgaattatttgaagtattatactgacatcatgattgaggaatatgatgcattttgcaaacacggtaaagtgaaaaaagcgttgtatactatagatatattggcaagtatgaattatgttgtggatttgagtagacttttacggttagcgaagatttgtggggaagcagagggtttacaagaggccaagactgttcatgggaagattagtgcttccgttagccatttagatttgagttctaaccatgtattgttagaaatgtactcaaactgtgggttggcgaatgaagcagcgagtgtttttgagaaaatgtctgagaagaatttagagacttggtgcattataataagatgttttgcaaagaatggttttggggaagacgctattgatatgtttagtcgctttaaagaagaaggaaatatacctgatggtcaattatttagaggaatattctatgcttgtggtatgctaggtgatgttgatgagggactattacactttgagtcaatgtccagagactacggcattgccccttccattgaagactatgtaagcctcgttgagatgtatgcgttacccggatttttagatgaggctttggaatttgtggagagaatgccgatggagccaaatgttgatgtttgggaaacattgatgaatctttctcgagttcatgggaatttagaacttggagactactgtgctgaggttgttgaatttttagatcctacacggttgaacaaacaatctcgggaaggatttataccggttaaggcatcagatgttgagaaagagagtctaaagaaaaggtcaggaattc

SEQ ID NO: 282 - DNA, 100745 bp, Arabidopsis thaliana
gaattcactgggagccttgacattagatgttactgcgccggatttttgtgactttgacaaggatcgaactgaaaagtcagttaaggataaccagatatgggctttttacgattctcatgaaggtctgcctcgatcatatgccttgatacataatgttatctccgtagatccattcaaggtgcgtatgagttggcttactccagtaacaaacggtgagcctagctcaacgaattggcttggttttggtataccaaaaagttgtggaggtttcagagttaggaaaacactaatctacaggtcaccttacagtttctcacacaaagtaaacctggtcaaaggcaatcatggggaattccttatatatcctagaacaggcgatgtctgggctctgtatcggaaatggtcccctgactggaactatcttacaggagtcgaaacagttgagtacgatatagttgaagtagttgaaggatacacagaggaatatggtgtggtagtggttcctctggttaaagttgctggtttcaaagccgtgtttcaccatcatttggattccaaagaaaccaaaaggttccttagggatgaaatttcgagattctctcacaagataccgtcttacttgctgacaggtcaagaagcacccggtgcacccagaggttgcagacagcttgacccggcagcaacaccgtcacagcttcttcaggctatcgatgattatcggtaaggtgtaagattcaaactttttgtattttagtaatgtaatgtaatatgcttaaatatgaactgaatgttttattctagtttatgggtaacatagaagctagaagaacctacagtgcgagttttcgttgtgttttataactaaaaagaggagctctaatgaatctgaatattttcattaaatgcctggcaacaaaaacagtttaaagtgcaatacattaaaaaaaaaacatagactattcagaatttgtttcattactcctcgagcacaattcgactgcatagtgggaaagaattttgctgtcttaaccactcgacgatatatctttgatgaaaccgatgcaaacaatgtggcagtttgtggttatttgattcttgtcattgtcgttccacaaattctccaccgcacattttggaatcacggagaacacctcttgggacaagggaggatcatggagacaggaattgatgagcggaaaagggttagagggacgggaaggagaactgcgtaaagtgacacttccattgatttcgtctattaagcatctccgaaatttggcaagagagaactatgagatgatgaggtttgactgatctttgcattgatgtttactttaccagctgtagtcttcattgtcaacaaattcaagcagagaaacaagagagagatgaaatcgtcagaagaagatgttgagatacaaaaagacaagcgattgttgatattataggtaacatactataatagaaacaaggagactttaaaatttgatttttcattaagtttctactaaaggaaacaaacttaaacgaatctaaattgtttcattattacatgcctaggcagcataagcagtttcaattgcattacattaataaaaacaagggtaagcatagactattcagaatctatatattatatgattgttgactctcttcgagcacaattctacggcagatagggcaagaattacacctccttaaccactcagagatacattctttatgaaatcgatgtgagcaatgtgccaacttttttattctcttaccatcgttgacgtaatcgttcaaaaaattctccaaacatataggacatgtcgattcgtcttctacttcttgagtttcttctttaggaagacaagaaacaggaatcactgagaacacttcttgcgttaaaacgacgttaacgaacatgaacaaccgttgtagaaacccaacgcttaaactcgcttgaccagtgattacctcagcgatatatttggacaaggaaggatcatggagacgagaatcaagaagcggaaagagatgaaacggagtgaatttgtagtttaagagattcaaacggatttgagagatggggagaggaggtcctggatacaatccattaaaagtgatacttccattggatttgtcaatcacatatctcttgaattgttgacggagattgatgatgcaaacagtgttgtttaggctcaagggtaaatatgtggtttgactgaatatcttcgtagtgatagcgaatttcatatctccagtctccattctcaacaaacttaagcagacacaataagagagaaatcgttagatgttgagatgagaagagacaagtgtttgttgatgttattatataagttttgcgctcaatagtaagtttccttttttgtttttggtttcatctacttatttcctttttcatagacttatgttaacgtttatctcttgctatttccttttttgtttgttatcctttccttttctttttgacagaactctgttttttgctgttgtttctatttgccttttctaattcgaactagtcgatttcggtgattgtattgactgtgatttatttgaagaggcaaagaaacaacaagagccttaagtacaatgcctagttttacttgtaccggttttcaaggatcatattattggacctacagataattcctacagacaatttcataggtgattcttcggttttgacagtttattattttgaaaactgaacatatgtactctttatttttctgtagatagatatctttctcacgagtacaacaatttttttaccttaagctgcttgatgatcgcttcatgagagacatgagtattacatacgcagatgcatcatacataggcacattcgttatcttgttccctcataagaagtttctcttcttgctccaccctttgcagccatttcagccctagatcgcaccctgctcttgcagcgatttggaactgttcttttgccatctctaatggattcatctccggattttccaggttctttcttgctctcttgggaggtgaaactcccacgacgttcaattttgttagagattctgggacttgcacacctgtatagttgatatcttaagcaagtaaccttgaaagcaagaaacataacgatattgttgtgttcctaagatctagaaagccaggagtgaccaaaaaacaaatccactttggatagccatgaggatctgatgtaaaagaagcaagataagtctgtgctgaaagaggattactaacctctaagtaaaagagatccatatgctatagcagcaccagcatgtccctgaacgtttacaagaagatgtcagactatggaaactacaagaagataccactttacagactcttacagattttacataaaattttgacataagacaatgcatgtttcgtcgatattcaaaagtagaacatatgatgataactatagcgcagaatttacactaatgaggcagtaatgaaacgaaaacagaagctggctctttgtaaacactgcttcagcggtacagatctacagacaaaataagaaagagcagtatcgccagacatgaagtttattaccttctctgaagccctatggaaacaccatatagctgaatccacatcttgcttcacacagtctcctgtcagatacactattcctaaaagatagagggcacctggatgtagctgcaagttaccaactcaaggtgagattactatgaaatttccgaattatacgttcatacaagtctctgagctgcaaaaatgcattcatacctgatcaacagcattctctatatagtgaaacgcctgttgatccgactggacatgatcattctgaaagaaagattgcaattagtatgaaatgctggggcagtttagtgatgagtgggagacaatcagacagatattaactaagtaaactttcgaattctgaggaaacaaagctgctcatgaaacagacattcctcaactaaagagtagcccactaaagcaacaatgaaactgattaagataaagatgaagctctaaggtatctacatctaatgttctctctaagaagtcggggaaaaccgatattgtaaacattattaacaggcggttacaaggacgaattgtaaggaagcctgacctcgactcttaaacgacaccctagctcatattgagcatctgcattacccatgtctgcagcttcgacaagcaaagcagctcccctgtgatgatcaaagacaataatacatggataagaagacaacaaaaagaaatatgtgactaatgatttacttacacagctttacaagctccaggaacatggtacttcaggtgcaacttggaaagccaatacctagcatgagtgttcaaattatcagcttccagagcaagttcaaagttctctttagctccctataaccagaaaaaaaaatcatatttagaaataaacaccaacgatacaaagcactacattcaaacacttatggcatacataagtgttataccctgaggagaggaataagacgacgatcattgagttcacagtaatcgataactctctctacttctttaatcgcgctccatcctttggctacatactccattgccttctcattcctactgtgtaatcctctctgattcaaaccataaacaccacaaacgtaaatcacagaaccgaaacaaactcatttccaatcgaaatccacaaaaaggaaaatgtcatactcgctgttcgaatccatgaacagtatgatgacaagcaatcttcgattccgcggcgacggcggctgcttgccggagaattaaacgacgaaacatgatttagccggagaagaaacctaaccggagagaattttgaaagaaaccttcaactaggcttagctaaagttgctttttagtccactgtattttattcaagcccatataaagcccattatcataaattacaactttcccctcgagcgtcgatgctaagttctcggtcggattattcaagtttgtcgccgtcaaaacgaaacaccaacacaagttccgaccaaactgggattctgttatcactttggtctctgctcttctgatgtatacgaagttatcattgttccccagaaagagttcttcactactctccatagccaacgagaaaaggatccatcaatttctgaggaatctctgcacggctgttgaaaggttagattttggaaactctaatgattcgtcagaaatgaaccctagagaagggtataatggacgaatccagaaccgaactgggagctctggggaagttagtgaaagtattcacacacaaagtcagagtctgggttcgaatcagggaagaaatgagcagtcatggaagcagagtcctagtttgtctaattctcaagtccaatctcaatatcaaggcaattggtacgggacaaactctgattatcagaatggtgtaggatcgtcttggcattcaggtaagactattgatcgcgaggtatatgacatgattatggaatttgatgaatattgcatacaagagaatgtaagagtggccttaacgactatggaaaaactggagaagaagggttatgttatggattttgttagactcttaaagttaacacagctatgtagggaaggaaatgtttattacgaagtcagtgttttagaagaagccaaggtttctgttctagcgaagatcagagctttagttaacaatttagaagcgaattatttgaagtattatactgacatcatgattgaggaatatgatgcattttgcaaacacggtaaagtgaaaaaagcgttgtatactatagatatattggcaagtatgaattatgttgtggatttgagtagacttttacggttagcgaagatttgtggggaagcagagggtttacaagaggccaagactgttcatgggaagattagtgcttccgttagccatttagatttgagttctaaccatgtattgttagaaatgtactcaaactgtgggttggcgaatgaagcagcgagtgtttttgagaaaatgtctgagaagaatttagagacttggtgcattataataagatgttttgcaaagaatggttttggggaagacgctattgatatgtttagtcgctttaaagaagaaggaaatatacctgatggtcaattatttagaggaatattctatgcttgtggtatgctaggtgatgttgatgagggactattacactttgagtcaatgtccagagactacggcattgccccttccattgaagactatgtaagcctcgttgagatgtatgcgttacccggatttttagatgaggctttggaatttgtggagagaatgccgatggagccaaatgttgatgtttgggaaacattgatgaatctttctcgagttcatgggaatttagaacttggagactactgtgctgaggttgttgaatttttagatcctacacggttgaacaaacaatctcgggaaggatttataccggttaaggcatcagatgttgagaaagagagtctaaagaaaaggtcaggaattcttcacggagtcaaaagtagtatgcaggaatttagggcaggggataccaatcttcctgagaatgatgaactgttccagctattgaggaatttaaagatgcatatggtggaagtgggctatgtcgctgaaacaagaatggctttgcatgatatagaccaagagagtaaagagacattacttcttggtcatagcgagagaatagcttttgctcgtgctgttctcaacagcgccccccgtaaacctttcactgtgatcaaaaaccttcgtgtgtgtgttgattgtcataacgcattgaagatcatgtcagatatagttggtagagaagtgatcacgcgagatataaagagattccaccaaatgaaaaacggggcttgcacctgtaaagattattggtgattaacgacaaaccttgaggtgtgttctatagtagtgtctacgttgagaatgttttggctcttcttttctcataaatcatcatattagttttatgaaactgatttatcttgtctctctaaatctgattctcagtctccgaaacacgttctcataatgtctgtgttgggaactttggcaggatggaaaaacataaagcaaagagtcacaaagacaaatttgtatcataagcagcaacttttcgaccacgtctctttttttccaggcatttataccgtggagctgccatattgttgtcatagatctatctcatttctcttgtccatttgatccagtttttgtttgtgtccaggttatgataaactataccctaaatgctattgtttttctgagtaatattatcaaatgtttgttggtttggatttgtgaggaagataggaataggatgatgtttggaacagtccaactaaggtcttactttgttcttctgatgcatcgtgtaaagtgttctaggcctgtgcatagaaacacttaaaaaaaagtagtgggtcaacttcaaaaagtcttttgagttatataaaccttcaaaaagtaggcatgaatgtgttgtcacacatgattgatgtactcaaacccaagttatttaattaatcgttattccaaattttttttttgtctagttttgaaatgtttaaaaataatgtatgtttaatatttttatgtaattattaaatttcaaaaagtaaaataattttaaaataatttattttttcttgagaatctctctagtctctatgcaaattttttttcaaaaaacataaactatcatctaacaattaaaaaaaaattagtgaaagcccatggactttctggagatgatcttaagactttttgatcacgcactgttaacttaagcctggtgtcaaatatttaatgtaatccaaataaatgaatttgctagcctcttgttacgccaagtttcatattacaaccctaattcccaaattctcttccgataaattgttcacaaatccctagaaaatccagagggaatcttcaaatcttacggtgatcaaacctgcttcaggcctgtacagtgtactaggtaaattcttatccaattgttcttcttttacacccttgatcgccacgaaagtatcttccatcgatattcgttgtgggtttattgatttaacgtttcctcagaactaattttggactagtcttgctcaaattttgactacagttttgtatttgctaattttgagtttattatgtatattgagattgtttctatctctcagattctaaaggtgtgatcttttttgcaggaataaagtaaactatcatgagattcagaagaggaagtagagttgaggtgtttagcatcaaagaagcctcttatggtgtgtggcgatcagcggagattatatctggtaatggtcacacttacaatgttagatattactcttttgaaattgctaacaatgaggttgttgaggatagagttccaaggaagataattaggccgtgtcctccgcaagtagatgttgatagatgggaagctggtgaattggttgaggttcttgataataatatttcatggaaaactgctactgtcttggaggtgttatctggaagatattatgttgttcggttacttggtgctaaagcagaactcacggttcacaaagtttacctcagggctagacaatcttggcaagatgaaagatgggttatgattggaaaggtaagtttttttacttatttatttaatggtactgtgttttaaagtgatgtttgaacaatgatgctaatgtctaactgtcttataatcatctttcaggtatcttgttctgtgaagtcctccacgctgactggatcagatgaacaccagaatgtgaacccccttctgaactgtgtggccacaggagactagtgttgcttctttaagagtgttgaagagaccttcaccatgtgattgggcggagtctgctgaatcatgcactagaagtcctaagaagatacgatcattggaggaagaaggacaccagcaccggtttgcttcttcttcagcacagaaggtatataatgatagttctgaacgtaggggtgttgaattgtacgtgaaagcttcgtgtaacgagaataaaagtggtttccgtcaaatggtcagggtaagatcaaaaaggtttagtgaatgtgttggtacaggaaactcagtctctaatagttgttatgatactgatgcatcctcagttggtagttgtagccctattagttatgatgagagtgacaaaccaacttcttttctagatggtgccgactcttgtagtagtgatgctgaatcttcaaaagaagcatctggatgcagagatgaagctaggcgaaaacattcattatcaggtaatggatcagtggtgagatcatgtaggcctgaactttacacttaccgtagtacactgacgaagttatttgcttctggctccctaagttgggatcaggaagcatcactaactgatctccgactttctcttaatatatcaaatgatgaacatttgatggagctaagaaatctcaagtctgccggtacccacagttaattttgttagtatctattatatctttttgatccttgacagtcttatcttcaggtgttggccatacttccctgcaatgtggaatcaactgttgtatattgttctgttaccggaggattgttaaaatgattgtatagacagcagaagggaaataactctgactgaaaatttcaaatcctcattgtgatgttttcttcttatagtctaattttctttgttgtactttccggatgattaaacttaaacaaaagttacagtatctgtgttctaagatgagtcatgtcttttcttcatatatatactttagtttattgtgtttaagcttctggataagtcgagtcatttgtcttctcctcatcagtgatggattattgaacttaccttacatttttcaggaaaactgtagccatgttgggtgactgcagatcttgcttgcttctagagatcttactctgatgcatgaggttaactgaatggtgcaaaacacaatgccccttcttcctcaaaattcataatttaaattgtgctgtgttttctttttggctgtacataactgatctgtttcaggtgttcttggatatatataccctctttacacaggctgtgaactgttcctagccgaaggataatcatttacagtctgcaggttggataagtttgccgacgattggtaagtattaggttgaaagttctttatgaactgtgtctatctgagacagtattgaggttgtgtggaatacttttactctttcagcaaatgtgaccagtagattgtggaactgtccatgcttgtttgttggtggtatatgtacagttggcctggtcatcaaaatctacagaaaagtactcaatttttatgaaatcaaggctatgacatttcaagctgaattaccgaggtgcggggattcaaacgttagcataaatattatgatcggtgtgtatagacctctgcataaatcaaacgtgtctagctgctcgcttgtcaaatccaactttttccctatgtctcaagcttaaagaaattgaaaagactcagagaggaagaagaagccttgcgaattgcgatgttcttatgccatcactatcggttttatattcgcttatactctacactaagaaaaataatcgaattgaatatttctgattctttagaactcatgttaattcaaaattttatggttgttacaaaacttatgaacaacattatgatctgcattaacttataatgttttcaatgtgttctatgtaagattgacattatttggaaccacctgttttacttatattattttattcttgacttgaagttgatttgtggcttctacatgtcactagcttgagtttcaccagaacttcataaaatcaaattcctttgcaacttaaaagcatcagagaaaccaaacagaaaagcagtagcagaaaaagttacttgggttgcgttattgattttattcaaagccaacagacgcaaacatgtaactaacacagttaccaaaactgtcacaattaagctttccaagtaccagagtagattgattccaggaaatgattatctaaataccaatttgcgcataaaccaacctcctccttctttctcgatttaccaagcgtttttggattgtagtcctcctatttgaattttgccaattattgaacaacagaaacttgtatgatgtttttaagtattggtaatattagtatgtttgggggacaaacaaaagcctaattaaccaaaaaactatagttaatattcagttcccagagcaaaacggaaaaaaacatgccaatttgttaattttgaaagtttctatgagcactaaaagaccaatgaaccgaaatatacttgctatttttgtggctacaaaagcagaaaaaggagggaaaatagttacctgttggggcccacaacaaaaaagaaagaaacaaacgtaacagaaaaaaggatataaaaggaaattcgaaaccggcgaattcggagaaaaaaaaaaaaaaaccttgcgtgtttatccgcaagggattttgattttggaaaaagaaagagagagggatctgaagcatggagaagaagaaggtatggttttggggtgtgaaagacgacggcgaaggaggcggaggcagaggaggaggaagaaccaaagatgcggaggatgatgttgctgaccatttatctcgcgacgggacgatgagtcagtatagccttagcaaaggccttcttccttctcttggagccaacaatcgttcctctcgtgacgtcattctccctcgcttcatcgtctctccttttgatcctcgttacaggtccgttttttcaaattttgactctgttttaatctaatcgctaaattagggtttagctgaggtaaaacattatttttcagagcgtgggagacgtttttggtgtttttggtgctctacacagcttgggcatcaccttttgaatttgggtttctgcaaaagccaagaccacctctcagtattctcgataacattgtcaacgggtttttcgctgttgatatagtcttgacattctttgttgccttcttggacaaggtaacttatcttcttgtcgatgatccaaagagaatagcttggagatatgcgtcgacttggctgattttcgacgtggtttccacatttccttacgaaatttttgggagcttgcttcatgagagtattcagggatatggtattttcagtatgctacgtttatggcgtcttcgtagggtcagtaattgttttgccaggtgagttctttggccggtttatcgttccagccaaaacgtttaaattccagctgagtataatattgatgtcttcttttcaggttagagaaagacaggaaatacagttacttttgggttcgctgctcgaagcttctccttgtaagtagctattgtctacttgttttttacactctttttggtttcaaatgaacagttttttagctgtgaatttacagtatttgatttggtaatgcaggttactctttttgtgattcattgtggtgcttgtttcctctattccattgctgcacattatccagatccatccaagacgtttatggcattaaccgatgaaaattggaaagagtctcctattgcagtgcggtataacacggcaatgtattggtccataactactttctccacaactggttatggtgatatacatggtgttaactcaagagagatgactttcattcttttctacatggtttttaatcttggactgtcagcatatataattggtaatatgaccaacttggtggttcatgtgaccggccgcaccagaaaatttgtaagttctatgtaccggtactgttaactgcacttctctgaaaattagtctggtctcagtgaagtttcatgagtcttaagcatttgcattattttagagagataccatccaagccgcatcagggtttggtcagaggaacaatctgccagtgcggttacaagatcagatggttgctcatttgtgtttgaggtacagaactgattcagaaggcttacagcagcaagaaataatcgattctcttcccaaagctattcggtccagcatatcacattatctgttctatgaagttgttgacaaaatttacttgttccatggaatatccaatgatcttcttttccagttggtatgtttcccataacgcaagaagtcctgcatgctaaaagtggtcactttattcacattaagtcttaacttacggtgtcctgtaggtcacggaaatgaaagcagagtattttcctcccaaagaagatgtgattttgcaaaatgaagccccaacagatttctacatattggtgaccggagctgttgtaagtgtttttcgtacattcctgacacattcctttatcatcatgtattattcctgacacattcctatgtcattcaggacataattgcacgtgtaaatggagtggagcaggcaagtctagcttttattataccgtttctttttaagatatgattgtgttcttctttaactttgttgcaattggagaaccaaaacatatttgataatgtttttgtgtatgtgtttctttacaggtagttagtgaagcacagagaggacatgtttttggtgaagttggggtactatgttacagaccgcagctgtttactgttcgtaccaagcgattgagtcagttgcttcgtctgaaccgtacagtactcttaaatcttgttcaggcaaatgtaggagatggagcaataatcatgaataatcttcttcaggtttgtaataactctgaatagtacagtttgtttcaacctgttgacacacaggaccagttccataacagatatgttgtggttcatgcagcatttaaaagactcagaagatccagtgatgaaaggcgttttggctgatacagaacacatgttggctcaagggaaaatggatttacctctcagcttgtgctttgctgcagccagaggagatgatttattgctgcatcagttactaagacgaggctcaagccctaatgaaatggataaggacgggcgaactgcgctggtaagcccggatttcctttgtatataccatcatcctccttttaatgcctaaaccaaatttgctcactctctatgtttcttctttgaatatctcagcatatagcagcatcaaagggaagccattattgcgtcgttttacttctcgaacatggagcagatcctaacattagaggtaagtagtaaaaaataatgtttcactaggtcaattagcttaggatgataggatcatgtagtactaaattatcggtggctcgtacattgtttacagattccgaaggcaatgtacccttgtgggaagcaatcataggaagacatagagaaattgctaaactccttgcagagaatggagcaaagctaagcttagactcagtgagctatttctctggcttagccgtggagaaaaactgcttagacgcactcaaagacatcatcaaatatggcggcgacgtcacactccctgatggaaacggaaccacagctttacacagagcagtgtcagaaggacacttggagattgtgaagttcttactagaccaaggtgctgacttggactggccggattcttacggatggactcctcgtggtcttgccgatcatcaagggaatgaagaaatcaaaaccttgtttcataatcacaggcctgtggagaaaaaaccgaaacctatccctggaatacctcagagtcctgtgacagggaagccattaatgaagtatagcagtgagcctacaatgcattcaggagaactcgtcttagacgggggtcaggttgttgtttctcagaaacggaaactcaataacttcagaaactcgctcttcggaatcatttcagctgcaaatagcggtaaaaccacctcacctctccatctgctctctagatactcgttgctttcttgtcacgtaaccataattttcagaacttttcacatcacaatagtcattcttatatacaattcacaacgttcattacattgttctgttccttacaaatttacaaatttggttttcatttctggtttttttccagctgatgatggaggagaagttccaagaagtccagcggttcctggaggaggaggtagtatgatttatccggagagagtgacgataagttcgccggaaaacggtgaaactggtggaaaagttgttttgttaccaaattctatggaagagctattgaaaattggtgaaaataagatgggattcgtcccaactaaagtacttacgagagaaggagctgaaattgacgacatcactcttatcagagatggcgattttctccttctatcaagggatccttgattcacacgcaactctctttcgattttgagtaatgaaaactatttgtcttaacgcaaactcgcaaaccaccacagtcaagctttatggtggtgatatgatgctaatattaggggaaaccgtaagccccaatcaactccgggattgaaatatcttttaggttttttttttttgcttttgtgtatatattcactgcttactatttttcacatgtatatatatatatatcctgttgactattttctgttaaaagaactctctaacaacctcatgatattaacatcgaaatctacaagaagtatggaaacaatcttgtttttttcagaaagcatacaaggataaaggtcctttcttaaacgtctagacaatcttcttctctaagtctctaagaagaagcaagtgttaaaatttataacttttgtgcgaggtcgagatttgagagtaactcctcactcatcttttccaatcaagcttaaatcctctctaggtgacttatcctatttctgagatgaattatcatctcatctttcatttttgtttagatccatgatggtaaagtgatattgatgggacttgggagccaaagcattaccgaaaatgagcacaatgattgagatagagttagagacaacacacactataatattattattatttcatgcttcaaatgcaagaaggtaatatttgaatcagactctagagagcttaatctgctcccatctctctgaccaatacgaaacatccgcaatctgctcaatcaacctaaagaggtgaagttgtattttatgtctagttgaattaaaacccttgtcaaattagacaatggtttaaggttgatgagaatttgatgttggaaaaaaaaagtgatataaaagataaaagcggttcaaaacggttttgcgattgatgttaaaagagtgcgaccggttgtgggagaaccggtcaactcctagtcctagaggctagagagtgttgtgttgtgtgatttgtggtgcagataatatcttaaccggcttcaaattttaaaatctagctcggttagcattttaaaactgttttctggtttgattccgtgtctatctctcggctccgttgtatcggaaggtagatattaaaactgaaagaccactgccgtcgagagcaactcaaaagatcatcagaaccgattcgaacgatgtcgtttgggtctctcgtgcttccatctccaccttcctccttgtctgcaaatgtcaagcatttcaatggctacggtaggcttaatcgtaatctcgtgcgagcttcttcgtccgatgttcccgatttcctctctgccgattggtacgcctttaaaatctctttttaactcaaatttcctcgattttcatatgtttcaagctttgggtgttactgggttttagctaggaaacgaacagatccgaatgcgtccatcaattggtttgtagaattctggttcccagaaactaaaatgatcaaaaattcgattttgcaaagctatagttgtagggcgtagccattagagatcctttctatgtttctccatcttttttcttcataacttatgtttatggatggatggttttaccaggttggagagccgtaggaaacgaccttttggccccagacttgatgtaaatgaaacactatttactacataagcttggaacattaccttgctttgtctctattgtagtgtactgatccgagttttagatattcttttttggtcatagtttagtgcagaagacgctgttcgacatcagcttgatgcattgaagtataatgaccatcctcgtgatgattatggcattgaggtcatgtatcgggtaaatcacatcacgaacttccttgttgtttctttcagttactacagcttttgtaatgttttgaaatgttttgtcaaaaaaacaataacagtttgctggattcgatccatttgagagatccacctatttcggtcctttctttgatcttggacaggttaacttaaaacctttcttttaccaaaactttgatgatcattagatcatattgttccttagctaaggttcttatcccctggttctcatttgttactgcagtttgaaaggtttaggcgtatttttcatcactcgtcttaccgtgtgttgcttggtcacaaggatagaaaacttttaagcagtttgttcgtggaggaggtatcatctcttttgttaatatgttacaattattatagagctcccctcatgatatcctctttttcgatatgcagaatcgtttcaagcagaggatctggattcagggaaatcgacctgaagaggaagagatatttgaattcacaatgttccaggttggttcctatgtcagtatagagactctatgactattgaatagttaatattatgtggatttatgattaaatgaagccatttgtgtgtaatgccagcgaataggcggttcatgggatggatattggttgacagaaagcttgcttcatgacggagatgtgttttcaggagggatggcttactgattcaacgcgttgagctttatctcttttttcgggttattgatatgttcagtctgattataatcgtagtattgtgtgacacgtcttgtaagtttatgttaaatattagacatgattagatttagatcaatacaaatatagtagcttcttatgaataaaaaaaagttgtatatccagcttttgcttcttatgttttgtgtatttttgtgtcgattcatctatatatgttcgaaacgaacacacaacatgtaatgtttttgacaaaattattttggtgattgtaaaggcaaacgccattttgtaaagcatgaaaaatgtattgacgccatttagtaaagcatgaaaaatgtattgttattttttgtattttcctttcacatacaataaactgagtttgacaacaacagaagcctgcagagtttaaagctcattcaatgctcatcaaaaatttacagactctcttatcatttgtcaaaagagaaccaaagagtacaagcatgaagaggtttctccaagtgacttattaccaaatttgaacattaccaaaaaatagggattcaactcaaggagaatcttaatcacacatggtttttcttctacacaagagatataacagcaaagaagtgtaatttttatccggaactttgaaaaatagatcatagaatgtatagactatagagtacaagtccataagttaccagtttatatatctctattttgtaggccatgtagcttgagctgacataataatcccaacgataactccaaataacccgagagcactcccaaagatctcaatcacaagaatcttaacaaagagcgtcgagttctgagcatcagacaatgcgcaactgcttccaatgattcctacacataacctgcaacaaacaaacaaatccccataaacagtgagaatttcaatgtttacaaaggttcaggaggggaacaattagaggatgaagaaggttatacagacccgcatacaaggtttgcgaatccaacaatgattccagaagcaaagattgcatatccagctcttagagactcagcatcatacatctttgatgatggtacactctccaacttcgtttgtaatatgattgccacaataacaccgtatatagccacggcttcacagaagattacactgaaaaacaatgaacaaacacttgttcattcacatagttctagcatctaaatcagagccaatgtgacaaatctctagatcaacctttctttcttcaatctcctaaactacaatctaatggcatacgcattggttcacacaaattgataaaaaaattcgtgaaattgaaattgaatcgaaggcaaaacctgatgagattcttggaagtgattcgaggagcttcaatggcggcaccgatcaaactacttccggtaatgtaaattcccctaaaccataaagagagagagcaaaatagttttcgtaagcatgatgatttcgcaaatcaatggggagaagaagaaaaggatttataccaggcagcaccaagaacagagacgccgatggagatggcgattccgatggcggagaaagtgtacggggagattctcaccagagccgcgccccatgaactcgcatgaatagccacaccggacattttctctctatctctttgatatgaatgaatttgatttgtctctttctctgtctttcggaggaggagatgattaacagagcctgtgcgatctgaaattgagcaactccaaatcacgcgctgatgaatgcgcgtgaattcaattaccatcgtataggcctcgtaagcgatacgaatagcccactttgatcggactattgggccttgttcctcatttgaatatccgggacaatctcgttgttcagagtttcacgataaaatagtaactgacgatggctcactcagcctcatcactagactgacttttccagcatccgcaaaccgataagtggcgatgtggtcaaagccgaccctcgagtttactgcatatctaacatacgtcattctgcaagaacacaacatattcggtaaacgcaggaattggaataactttctagttacaaaacaaatgagactgaagcagaattattattatgcaaaagtgacaaaaaaatatatcctaccaaacaataaattattgtatgccgcctcatgttataacttactcaaattgcgagaatttaacagaacaaaacctccaaaccccaaactataaaattgtaagaaaagacaaaacaaaaacagagaaatcaatcattcgtcaccatcctcatgtcccccaattagtttcccaagccatccaagtagctctgtaaatcttttaaaccctccgccgagaagcttctgtgaactctcaacctcggcgctaccaagttcggtggtggctgtggctgaagacacacaaccactgccgtcacattatcagcactcttcctcttcaaagcttcctcaaccagctccttactacacatgaccgggtcattgtgctcctgtagtctccttctggcaaaatctacagcattctggctcatgaacacatcccaaaccccgtcacacccaattataaggaactcatcctcttctgttagttttgttgtcatgagctcaggctctgcaattagaggtccacaatcagaaccatctttcttcttcttcatgccttccatatgaaagtcacctagcgctcgagccacattaagttgtccatttagatagccatcgaatacatgtccacccgatgcttcaatgcgtctcctttccttactgctcatgggtttgtggtctcttgacatttcaatggcttttccctgacgggataagactgctctgcaatctccagcgtttgctaccaccaacgacctgttaccacaaaactatatgttaacacggtaccaaacggtttcataccagaatactaatagagtatgaaatgagcaagtatatacgtgactcaaagaccatatgagacaataactacattatagcagcagcacatatgggcagagaatacatctacaggcgaattagttgtacatgattgtgttaaaggtcaagattatgcacactacgcagttgaggataagcatctattcccaaacacgtttttctttaacataaccaagatgtaagagtttaggttagacaaaactaaaagataataagagttgaatcaacaaaccttccaaaaagaatagctgccaaagcagtagttcctgaagcaaggctcccatccaatgaacacgcctctaagaaggcagtgtctgtttgaagaaatgctgaagataacaccttattgatttcactaggaaactcttgatcttcaacaatgtacctcggtatatggtgacatgcaaactcagcggcatgcttcccaccatgtccatcaaatacctaataacaaacaaaattcaataagagatccccatattttcactacattcacagttgtttgcttatgctacaaatctacaaaaaatcaggaaaactgaagaaagaacataccccatagaaggcacttggaccagcctcagaattcagaaggccaaagctatccatgaaattatcaacgcatagataagcatcttccatgcttgacctggagccaatatcagaccaagctccagaacgcgtagcaggaacaaactcagacttgttcttctctatagtaaactcattctcaacagatatatctgacaccattgtcttcacctaccaaaatgaaaatcaatcagaaaacctcaaacatctcataatgacacattaaaaacagaaactttctaccttaattatacacattaggaaaccaataatgatcaaatccaaaagcagagcaataattacaaaacctcaacttaaattgatcattcaatacacaaaataaacctaactgatccacaaatcaagttgaagagaaacgaatcttacgagagatgagtgtcgaaccagtgacctcttattacacggcgccaacgatcgctcgccgtcgaaggtttgcctgtaaacggcagcagcggcggaggaagaagagaaggagagtggattcggcggtttaccgccgtaactcgaactcccattctctggatcagaaattcctctagtttcttccatattgaaacatcatcgtataaaaattcaataagcaattatggaaacagctgacgagtcaactcacgagtgagcgagtcgattaaaaacgatttaacgaagaatgtagctttagatgagagattcgtaaacaatggattcagaatcgaaaacaaaattgaagagattgttgaaaggttacacgaatttcagggtttaagagaaaattagggttttgtggaagaaattggaacacgcagaaagagagagataataaaactgttcgccggcggaggcgagaaatatgagtccgacggttatttaaaaggcaaaaagaaaaaggaaaaaggaaaaaggaagcttaacataaacacgaaacgtcggcgtattatttactttttctctttgcttttttttttcctttttgtttttgaagtgagagattttttttcttattaaaaaagggatatatttacagtttatatgagaagtaaacatagtattttgaaaaatagcaagaaaggaaatctgaaattttagactaatagcaaaaagattttgagttaagttgacaaaattgaattttagtaacttgggaccttttttacatcttttttatataaaaaaagtcgacacatgagatattacttataaaattaaaaatacattattttcatgaatatttaatagagtttatgaatttctcacatatgttaattattaagtgctgaaaaatgtttaattgtttttctgtataaatgttaagtactgaaaaatgcttggaatgtttttctatatttatatctctgctatttatatgtgtgatttagtgttatttagggcattaaatataagatattaaaatattaaatttttctataatttaaaaataagtaaataaacatgttgtagaccgtaattgccagattatttgtgctgtttcctaaatacttttacattctttgatggtcaccaaattaactataagaaaaattaggactcagtctcattaatttttcggaagagaaaaagaatcagtctcatggtagttgttaggaaatatttgaatattgtttcgccattagaaactttttatgtggatttttttcctgaaaacgatggttactattaattaaacggaccgacaagaaccttgttgacgtggtaacaagtgatgacacatgctaattggccatcattgtcaaataatttgttcgcaaggcgtgatacgtgtacgttgttattcagacgtagcaaacagattcacgacttttgttcaatttgtctttgtatggagtatggacctaacatctccaacggaccaatgctattgggtcaagtccatcttttctaggttaagttcattctttgggctttagttaagtatagagaaagaacatattggaagaaaaatttagatgtggtttgtattgcatgcgcatatgaaatgtaataatttgaggatacatatatagtaagaaaaaatgagtgacccaagtaagaatgggttagtagttatatatatgttggaggtgaaaggaataaaataaaatttgttctaggtggattcttaagaaaaagaaggaaacgaaaacagaggaataacaatggcagggagaataagctgctgtctaaatcttcctcccctagattcaaattctgcacaatcattagcttcactgctcaagacaacgtcaaagatctcttggtatctcttctattcatgaaaagttattatttacctgataatttttcatatcaatgatctttgttcttttattgtttagtaggagaacagaaaatgagacagagccacggaaaaacaagtgttcttttgtcttgggggtggcggcaactgtcgtaatcggcgggattcagatcaatgatgttgcatcagtggaagctgcggttgtgaaatcgccggtagaagagatggctgcgggtgtggtgccgccgcggaggtggagtgacaagaggacgtgtccgccttggcttgagaactcgctagagaccatcgtaccggagaatcttcctcgtccgtctgctcatcgacgtttggagttagccggattagctaagggtgatgcaccgccggtcggtgtggtgatgacacgtgtcaacaggggtggttgtttctccgtgtaaattggaagttcattacgtgtaagggagattgttaggcaggtgtaaaaaaagtcaattagaaacaaataatacacacaaaaactattgtagatatattaaattttaagtatttgtttgtgtagttactgatgacaaaacattgaaccaaactggtctttaattcatgcaaaattttctttgaggatgccatttttgatttttggtttaaatcgaaccgtataaaaataattaactcattaaattcattgagatctttatgtgcacgattagttttggtccgtcctttttttctttgttttgtaatcttgtatcctaccaaattttgggagttttcagctttgtgtgttaaagtagtactctattggatgtgaaatgaaagaaaagtagtacatgcgtgtagtacaaaagaaaaacactccaagtacttcctactgaaatgagttggcctattatcgatccaaagtgaagcccaactctatgtcactccaacgattagtttgatttcggcctcgtatttcaaagtttaactacaactctacaaatttcacttccatgtcggaccttcaataatttaatttcttgatgctcatgttctttgcttttacaagaatggtgagagaataaagggagattagccttagcgagagagaaaagactcgtagcatgaagagaagaagaagaaaaaattggttttgcaataagagacctacgttaacaagaaaatggacacagcttgatcatcttatgcaaatccacactcacgattttctaaaactagtttgaaacttacagaaaacatttttttttgtaaatttcttagatatttcaaataactctctcgagacataaatcataaagacgataactagttaagatcattgtgaatagtttataatggatttaacaaaaaaaagaatagtttataatggagtcttgagagagttatttgaattattttgggaatttacaaaattgttggataaaaaaagtagttacaagaaaaaggaaaatatttacaagtgtgtttctaattttttcctactagaaagacaactagataagatcatttcaatagtcttctattcactaattatggacaagtaaaaattaaaagatttgttacaccatctctatcttacatttctctatttatagattcacatacccaatgtaaaaacaaatctcttgcctatataactctagacataattcattatattacaacaaacaaagattcaataatcaaaagaaaaatttagaatgacaagtaaatatttctccgtactagtgttcatcatcttggcttccaatgaagttgttgccaagagacactcttcaacacctaaattaagaaaaactgatttcccagaagatttcattttcggagctgcaacctctgcgtaccaagttgaaggagctgctcaggaagatggtagaggacctagtatatgggatacgttttctgaaaaatacccagaaaagataaaagatggtagcaacggatctattgcagatgactcttaccatctttacaaggaggatgtgggtttattgcatcaaattgggttcaatgcctatagattctccatctcgtggtcgcgtattttgcctcgtgggaatcttaaaggaggaatcaaccaagctggtattgactattacaacaacttgatcaatgagcttttgtctaaaggaattaagcctttcgcaaccattttccattgggacacaccacaagaccttgaagatgcttacggaggattccgtggggcagaaattgttaatgattttcgcgactatgccgatatttgtttcaagagctttggagatcgagtgaaacattggattacattgaacgagccattaacagtggtgcaacaaggatatgttgcaggtgttatggctccaggaaggtgttcaaaatttacaaaccctaactgcaccgccgggaatggagccaccgagccttatatcgttggtcacaaccttatcctagctcacggagaagcaatcaaagtctatagaaaaaagtataaggcttctcaaaaaggtcaagtcggtatagctttgaatgcaggttggaacttaccttatacagaatcagctgaggataggttagccgcggcacgagccatggctttcacattcgactatttcatggagccgctcgtgaccggtaaatacccggttgacatggttaacaacgtaaaaggcggtcgcttgcctacatttacttcaaaacaatctaacatgcttaagggatcatatgatttcattggcatcaattattactcgtcttcttatgcaaaagatgttccttgctcaagcgaaaacgttacaatgttctctgatccttgtgctagcgtcacaggcgaaagagatggagttcccattggtccaaaagctgcatcagattgacttttgatatatccaaagggaattcgtgatcttatcctctatgcaaaatacaagttcaaagaccctgtcatgtacataacagaaaatgggagagatgaagctagcactggtaaaatcttacttaaagatggcgatagaatcgattactacgctcgacatctcaagatggttcaagacgctatcttgattggagcaaacgttaagggcttttttgcatggtcgttgctagataactttgaatgggcatcggggtacacggtcaggtttggacttgtttacgtggatttcaacgatagacgtaagagatatcttaagaaatcggctcactggttcagacatttattgaatggaaaaaaggagaattgatgagatatgcaacattccaatatattaactaactagattaatacatgcacaatggtttgtttggaaaacaactattgttaatatacaaataaggtttgattttactgtattatatcaaacttaaatctcaaaaatagtggtttcaatgtaaaacttgtgcacactaaattaaatggaatagtatgcatttaaataaaaaaatcaagaattttcattcttatttcggccttctaaaattaattaattagttaaattagtttgtgattttattttgttgtggttgtcactagtggtaaattattaataatttaaaaatctaatattttcaataaaaattaatgatctatttttaatattaaataaaaatagttaaaattatagaaatttagttcatattgatatctctctaattcatttggaaaaatatttttagcacagacaacagtttatgcctgcatcattacaacaattttttttactattttctcataattttttaatactatttgagttataattgaaaagctaattacggttaaggagcagctatagataacgaattaatagattagagaggttaattatagagtcgtcacatctctctcacatgcctctctaagttccctttagggttttcttcttcactatagagactcatgctcttctcttcccaatcgccgcctctgatctctcttcctcgcttctcagattaggtattagacattcactctttcttacattgttataacattgatgaagtagaagcttagattcatatcattgccattggtcacgattaatcatctctttcactaaatcatcaattgtttcaatgagaaccaataacagctgaatcaatgtcgatacatttgttgttacgaaatcttttgaatcttcactgaatccgctttgtcatttttcttttgcagcctttgttttgttagattgatttgttatgtccaacaatctattgcctcagccttgtatgcaaatgggtcaattcattaatgtccctactcccactcctgagctgatttctaatccggaaatgagattgtcacaaccaatctgtagtcatatctctggtgggagacaagattttcatgtaatgttgcctagtgttgttggtttaggatcagttaatatggataagactctgttacctggtaagcggaaatctccgttgcatccttctgtgcaaaataaacggatggcattacctatggaaggtcgaccgtgggcgtctgctccaatgcctgtgcagttatcttctgtttcccctagaacacagtatttgcctgcttcgtttgttagtaagaatagttttgtttcttttagtaaacctgggaagcaagctgcggcgagaaaaccgactttacagaaaccgatgttgctgaaacctcaaagtgagtcgtctggttctgtgaggtctaaaatgagagaatctttagctggtgcattggcaatggtacagtgtcaaatggatgttcctaacgagtcgaaaatgttagatagtgagactgtagctaatcctctagaaggtcatgttagtgggccagtgtcagctgcttctggagttgatgtgatggtatctaatggaagtactgagatgctgaccctcagtgatcctagtcctgttgcgggtatctctgttcagacagtgttaccggagattttgtctatcgccaagacaagtgatgcccaagtacctgaggctgtaaaaccgtttgtgcaagacaatgtttcatatagtgacaatgtgttttcaaaagatgatcttttgcaagggaatgacctctcttgggctctcgagtcggacattgagtttactgtcaattgtcaaaatgaaatgattggtgcaatggctaatgatgggagcctggaaaaattgttactggatccacaagttttggcatttgaaatagagacagaactctttaagttatttggtggtgtaaataagaaatataaagagaaaggaaggtctctcttgttcaatttgaaagacaagagtaatcctaaactcagggaaaaagttatgtatggagaaattgcagcagagcgattgtgttccatgtcagcagaggaacttgcttcaaaggaactagctgagtggcgacaagcaaaagcagaagagatggctcagatggttgttctgcaggacactgaggtggatatcagaagcctagtaaggaaaacacacaaaggagagttccaagtggaagttgaaccaatggatagtggttctgtagaggtctctgttggaatgagttcgattaactggtctcgaacaaagaattttaagaagaaaaccccttccatcacgaaaactcttggagtcaagaatgaattgaacagctctaatgagagcactgggccaataaacggagtcacaatagatgatgagatgcaggctgccactggatctcttcctccaattgtctctcttgatgaattcatgtcatccatagattctgaatctccgtctggctttttgtcttcagatactgagaaaaaaccttctgtttcagataataatgatgtagaggaggttttagtttcatcacccaaagaaagtgctaatattgatctttgtacatcaccagttaaggctgaggcattgtcaccacttacggctaaggcatcatcacctgttaacgctgaggatgctgacatagtatcgtcaaagcctagttctgatttgaaatccaaaactacatctgttttcatacctgatggtgaacgtttatgggaaggtgtgctccagctgagtccttctactgtgagctctgtcatcggcattctaagaaggtttgtaataaattgtttcatgagtggtagcaaacctatctcagtattttttttttattccacatttccaaatttaggtttgcatatatgaatagctttctttatttagtctacatgttactacttatctatactattctagtgcttatcagctctataaaatgtttttttaatgaatatggcttcgctgttattgataccatgtttaccaacctgatttttacgcttcacagtggcgaaaagactactacaaaagagtggcctattttgctcgagattaagggtagagtcagattagatgcatttgagaagtttgttcgagagctcccaaattccaggagtcgtgctgtaatggtatttgtctacacgtttacctctatcattaatgtacatgttttatatacgcattctgtgtttgagcccctgcaaaagctattaactgtgacgtttaaccaagcttaagtagaagcatttaggaaagaagaggagagattaacggccaatactgatttgtgaatgattgagaaaaatacattacatctgtgaatcacaatggagatagatggacttacaaaaatattttcaccagaacaattgcatagcttatgtttcttgaataggcctccatattccaataaaactaagacctgtttgttctcgattctatatgtatgtgatgaactcgtttatccatcatggtacttctgaaaccttgctttcgtgttacaggttatgtgtttcgtctgcaaagaagagtgctcaaagacagaacaagagaacatttccgaggtatgagcgttggtagttaaccaagattctgtgtatccaaataaacgaaaagatgattaaaaaaacttgagatttatttgaatattaatgatttatttgatcaaaactgaacgcgaatctgtacaaactgaaaacccaaaccgaatttaaattgaaacactcctaaatatctgtagaatgtctaacttggtaacgaaatttgggcatttggttttgttactatacaggtggtggattcatacgctaaagatgggagggtgggttatgcagaaccagcttcaggagttgagctatacctatgcccaacccgtgggagaactgtcgagattctaaacaagattgttccgagaaaccaactcgatttcttgaaatctataaatgatgatggtcttataggtgttgttgtatggagaagacacacaatttaaaaaatcaccactatctaacaactctcacaagaaccaccgtgaaaagggttcttcgttaaccacatataatacttctcgttacagtaacatgctacaggtcaacaatgacgatggtgatgatgtgccaccggggtttggcccaatgaccatggctcgggatgaagatgatgacttgcctgaatttaactatttttccagtggggatgttgtcgtgaaccggacaagccggtctgtatctgtaagagagcttattcaaaaatatggaaaatctgaacctttgaggaaccaaagttataatgataatgacaatgatatactaccagagtggcagcctcaatctaactggactcttggggttactcatgtaaatggtggctcgatggttagaccatgtagtgagtggtggtctcatcaggatggcagaggaggatattaattgttttttgtttcaccttagcaattttgtgtttgttatgcattttctgttgcaggcaacactgctttccaaattttgtgattttctctcaacagtcaccgatatttggcactttattagtaagatgggcttgcgcagcccgctaatatattgctcctttctgtaacaaaaagtacaaaagtaacaaaatccactcctatcgattatactataaaacagaagtgcagagaaaatttcagtcatgatattttttgaccagctcgattcagaaatttggaaagactagcttttttttctctcgggtttcactttttaaaggtcgtgaaaatttgggaatcactgatcaattttgttaatatgatttcctgatttagggtttctctgcatgcctctagaatcagcaagtgtaaagcaattaccatggtgactccgaagcagatcgatttctcttcctgtggtggtggtgataactccgacgataccctctcccatcgagaatctccacggaatccttcctcaaagcgtgctgctgcttccttcgcagcagaagcaggcgaagagactatgaagaagaaaaagaagaagaagaagaagaatttgggtccgccgttgatcgtccggatctggaacgaggaagatgagctctctatcttaaaggtattctattcatcttctccgttacactttgatttggttttgcattctgattttctcaaaaccagattcgaaatttctcagggattagttgattacagagctaagacaggattcaatcccaaaattgattgggatgcgttttacagtttcctcggaagttctatcgttgcgaaattctccaaggagcaggttttgagtaagatcaggaagttgaaaaggagatttcatgttcattgggagaaaatcagtgaagggaatgatccgaaatttactaggtctagtgattctgaagcctttggattttcttcgatgatttggggacaaggtgaatttggtaatgatgatggtatggataaggagatggtgaaggagcacgatgtaaacggaaatggcgcagctgaaaatgggactgctcgaatagcacaggagaacgagagtggggaggagatgttaaaggagcatgaggaaacgttaaatgagaatggtgcagaggagataagagacaacgacgagactgctcggaaagcacagcagctcgagagcgagagcgaggaggagatgttgaaggagcatgaggaaccctttaatgagaatggtgcagagaatataagagacaataacgggactactcaaatagcacagcagagcgagagcgagagtgaggagatgttgaaggagcatgaggaagtggctaatactgaacttgtaaatgagaatggggcagcgaaaacaacagagaacgggactactggtggaaaagagagacatgatgacgatgatgatgatgagttatgcgctgtgcaggatgcatttgaggctgtaatgtcgcaaggtttaagtggttatcaaaagaagttgcagcttgagaagctgatgaaccttggaactggaaaaagaagagagttgagtgatgaatggaaagcgttatgtgttgaggaaagaagattgaatatcaagaagcttagattttccgccaagcttgcagaggcagctaatgatagttagatgaaaccaataagccgttgtagcatttggtgttaattaggttcttagtaagccataagctttagtctgttcagtgtatatctttggatgttgtctttgttctgtttgggcaagtgtttgtaagacattccagttttaactgaagtatccagaagagccatccatgtccattgttggatataataaatttcattactttcttgttgcaccaatcagtcaatgaagtggcaaaacattttatatgcattccctaacaaaaggcatttacaatgtaatttttacatttttaaccactaaaaggccagaagaagtgcacaaagaaagactgaccaaataataaaataatttttcttgtcggtagtcaccaaaaccatgctattccaaaatgcacttcctttgcaacaaacggcttatatccatatgaatccgacagaggaagacaaaaggatttagtcttgtgatgtagcagagtattcaaaaagcaaacgtttggaaggtgcagattgcagaaggacacgcaagcggctcgtgagctggtaaataagtgtccattgcattgccatctcagaatctttcatctgtcttaccacagaggcctgtagataaaagacagcaagaaccgtggagtgcttattttggttaggttttgaaaaaaatgaggccatatggagaagaaagaagatttcaatgtttatgcctgacctgaagacgttttccgagctgcacttcaacttccgttccaaatgatatgttgctcgccagagacttgagaggatccacagttggatcaacagagagtaaacttgggatctgcggagcatacaccaacctccatctcgcctgaccaaactctccttttccttctatccttggcattatggttccaagtgttgcggttgcaagttttttgaaagcaagttgtccatctccttctaatatggattctgctaattggctctcaaacacctttgcagcctgcgaaagggagattattaaacagagatttccatcaagaagaaaacacaacaatttccaaaatacagctacattttaacttcaaatttacctccgaaggtgagagagcatcctgttcaacagaacgtgttgaagtcacgacaagtttgtcctgccaattactggcacgactttgaaccctaaattgccattctgaaccaactaaggctaaatctagcagaggatctagtccatgttcaggctcaaactttgcaacgttgagatgctccctcttcagacgtacctgtgtttagaaaacaaaatagatgttggttactcgaggacatgttggctttgcaagaattatggaatgaatgagttcaccacataaaatcaaaacagagatttaggcaaaacctgagtagccacaagattgacatctccgttttcgaatgttaggacaccctttggtttgataaattttggatgagccatgccatcaagttcaagctcaccactaacagcaaaattaagaattaaagggtacattatcctcagctctggtcctaaaacaagtttcatatcactcagacggatatccatatttggtttcattttcacttcttcaatctccttttcaacagaatttgatttacctgttgcaggcaaaacaaaccgagatcattacaaaagtgtttacatacaaagtccaaatactaaaatagaaaaaaacgtagaaattttgctagtaaacatgtaggttaccagtcgactgagagaatttcatccctgaagaagcccgttcagtgccaaaaaatcgagcaaaatatcgtgaagaaactgcttgattaatagcagcacctggaatactatactgattggctgccaatctatttaaaggggcagctccaccacccttatcatgaggcagataagcttctccttggcttaatttaatatttcctgatatagttggctgcaacattgatccagtaatttgcagctgagtatcaacctgacaactgatatggcaacacgatctctcacggaatcagaaaaagtaataagctcagtaacatgagtctagaagagcaaaatggaagaaacctagacgatacagtatctcagcatgcagtctagatatataaaattaacaaaactgatccacgataaagtatgtacccatcaagatatatcaatagttaaagtaagaaagataaatcaaaattatgtactaaaagcttaaaatgattgacagcagcgttgatattgcagagtataccttaaaaaattctttgctcgtacttctagaacttcacatttgagctctattccatcaccagcagatgcttcatttgatctaaggggaagatttcctttaacaaccagctttccctttctacttaccctgctttccagtgaggtgatgcacaacctgtttgatttaacatgtaaggttccaccaaagtttgtgagcggtttacgaagcacaggtgaagagatagacgccctgtggaatgaagcagacccatcaagcactggatggtctactgtacctccgacctgctcagcagataggttatgcgtaaatgaatttagtcagaatttgaggacatggcagatcaatttaactatcttacaatgtaaagacaacacaacaagaggacaatggccaacctgaagcctgatatcagcatttccttggagccaattagcataaggagatatggctgttaacaaagtcattcccccatccttgatgtctgcctccagtctaacttctcctgcatctaaaatattccagtataaacccttgagactctcagctagttggctgtcccatctctcttcgctcctatcccttgaggttctcttctcatcatcttccttctcttttgcccaactcgggattttcactgcaccacctctatctgtttcgctgacttctccttcagacatatttttctgcgaaaagctaacaggaacacttccttgtatatggacatgaccattttggacaaatggttcaaagttggagttgaaaagaaaacgactgttagatgtaagagaagcaaaaacttcagctcgtccaaggtctataccaccaacagcaccatccaataacctaacttgtacatcacattctggtttttcaagactccctctaagatccccttccatgtgcaaaatgcctttgattggtgacaagagtttcctcaaagagtgaacaatatcagtagctgatgattcaacaacctcaaccaaggtaggtatcaaactaacagggaaattcagaacagcaaaatgaagatttgtttttggccccaataaggtcccatctgcgtgcagtgtagcgtttcctttttgaatgagcatctccttaagacgtaaaccatcatcattgttatacgaaccagtagccagaacacgctgtgttttgtaagtcccccactcccaatcatctccatggaagtcaaattcggcctggtattagatgtaagaggaaaacatttaaacaagacatcactagaaattctcacttaaatatctcactcataaaaagttttttctaaagacaattgcacccgtctccttggacacgaaagcttatgaaaaccaatttggagtgtcctttagatgatgacaaccttaaccctttattttaaaaacgagatgacagggttatttttataccaaagtgtctccattgcctccaccactagcatcaagcgaaccatgccaatgacccttgagctcagctaaacctggaagacttagatcttcaagaacgacttcacttggtggagtataatacccacgtatctcctgattttaaggaaccatataatttagcataggaaagaactaaaggcgagcttaatggtgtctacacaggtttttttgttcttattatagaatctgctttctgtattagaagcctgttagctacttcgaaaggacagaaggcataatatttaatacattacctcaagcaagtctcgaagattttcagcttgtagacagagattttgaacgctttggatgaaaagatcctgccataccaaccaagaaacccaaacagtcagaggcatccagctcaaagaggagatgagaacatatttttggagtacacgaacatgaaaatgctctagcaggtgtttttcttgaaccaacattttagaacatggctaatcacaatataagcatatgatttagcaataacctttgatcttgagtgaacagctggatctgtacttcttgaaagaagccttgcaagaggaagcatctcagcaacctctgccttaggcacttcaagtctcattctccatcttcccatggaggatataacacttcctagatgaccagtcatggctctcattaaaaaactgccagcttccttctgaccaaggtctcggtcacgggaacccggcaatacatattcaccttgaagctcataccggctattgctttgttccagaatagttttctcaacagtgatcttcaggaagaaaaatgaaaaggataagcagagataccatcatgcatattctcatattaacttcactgctaaacatacttatcaattattcattgttcaatctcaccataacctctagtcttccggacaacatgaaacacttaaaagaaggtaataaaacatataaatgaaataggcttgatttatttatggccaactatatggtggcaaatgatgtgctatgaaataatgaaactatataacagctatgatcactctctagatttcttagaaaactaaaccaaacgaactccactaatcttaggccgaaatacataccacgtcaccgctccatcttactgcaacatctaaagcttcacctagaactccactaaactttggccgaattacagacaacaggccatgccctcttcgcttctgaagatttagttgaatctctgcctgcaagtaatatggaaagtacgatattataattttataaagagagccctcccctgtaacttctgaaaagctgattttctaagttataagcttctatgagaagtattaaaccacattagaacttcaaattccattattctgctataactaagtaactaacacataatatttgcaggttgtcatcttaagaatgttttcttaagtgatcctaatcttcattgacagtgaacatgcaagaaaatatcctgaaaacactgaagctgataatactgttaatacactgctatttctgaacttcactcagcactagtacagaatagacaaactcatatcgattgcttaccttttgaatcaaccctctcagtgaggccaactccaactcatcaagtggaaaattgcgtatctgcgaccagaaatggggacaaaatgtaaaccatctatggccgattctcattctctttgaaatatcaaattaaagcatatattcacacaagagaaagcaatacctccaaagtagcggactgttgtggctgaaaacaagcgttagctcttagttgtcccttttgaagagaaaaggagagcaactttccactttgtacattttcgtcagaattaggctgtagtggacctataaagtctagtgtaagactttcatctggtcggcccgcggcatcaagctagatatgcaacaatactacaaaaatattagtataaacatcatgggctaacctttctataactacaaattgtctagaactgttaaaatcagatatatgagacgagtcacacaaatttgacaagatagccttcatggcttcaataaattgacaaaaaaaataaaataagaaaaagcttcaacagttagaaatctcatatcagttacaaatcttttcctgccgaaccaaaaaatctattgcaactacttttcagaaccaccatcgcaaggatagctgctaccagtgctctgtgtgttactaatactgatgatacggttcactgtagaagcaagaaatcagtacattaccttaacatgatcacgtgaaacgctcaaacgtccagacagttgaggggccaaaatcaactgattaagcttgagacttgaaatggaaatatcaccatcgaggctagaaattgcagctgcatcttcacatttgtctgacccaacatctccatcttttgtagtgctgtgtcgttttatcttccccagaaatttgatccttcctgttgcttttaaatgtgtaggtcgtggtgaatcaaatggataggaagagaccaagctgaaaaactcaaaaccacgcatacgtaaatccaaatcaagcccctcaacaacaaatggcatggcctccccttgagtgaagtcttggtgcgacaaacaagggtcatggtatgaggtatctaattttgtgaatagatcaaaagcaacagaggatgaattaacaatgatattatcatgtgatatcacaatatctccccgagcatcagtcaaggagccatcagctttaggggctgcccattttatgtcaaacctcctgcattcaaaattcaaatgaagcgcaacaagtcaagcacaaacatcaaagaacactaaatatagcccaagaggatggcaaggaaaccttacggtttcaagagggccccagaaagttttgtttccccagttaaatcacccaacttcagcatcccgatgttaaaatattcaggcatataacgatgcaaaaccttatcaaaagatatatttcctgaaaagttcacatccagtgcggtatcatccacctccccctgtaaacgtatatacaatttcagcatcaattaggaaaattgctaaatcagggatgatgaaataaagacactaaattttaggatgttatacatattgtccatcaaattaaccttataaaacagtatgtcaagtgagctagtgagtcgtgaaactattattcaaggaaatggcaatcaactctaggagattaaattgaaacttccatataattggtgaatggagtaaggtgagacaggctggtcgttgtgaaacataaacaaaaaaattcagttaacaaaccaagttacttatgaagggaagcataccatatgcttcattcgaaagagaaaagtctatatctcagacacaactaccactcttcatgcctaatgtggaacaaaaaaatcacaaccattttttggatgatagatggggcttgatgtagtcaattgatacacctaacaggctattaataaaattatctggaaagagtaagtatgcatctgcagattgacccacattacttggtcatattgttaatccaactgcttggtgtctcgttttccctcaacccagtcctcacccaacccggatacattaatgatgcaaggtcaactgtcgtaggattatacaaggaaaggtagggaagtacatataacatacctctggacagatccaagcattccctgctcctcgaatctccccaccatcaacaagggtagctctaataccatataaatcagcaacctatcacatgaaataggataatttgacaatatccgaaaaagtcatacatagactacttcacggaggttaaaacagaaatgaaatacttacacagttgtcagtgttaaatgtgaaattagcagaaagataagaaaatggaacacggtcaaatgctgcaactgcaccagcttccttgtttttcagcattgcctcatatgccaaagatgtagggagatctggagacagataagctatcttcctagagaccatgcaacttcccacaaaaacgggagcatcaagcgggccttgacagttgaatacagctgtgacagaaccagctagctgcagtccaagatgatagaatgaattgggactagatgaaggagtagataacaattagaaaaaaaatgaaatgaaaatacatcaagccttaataaatggtgaagtttaacggaacatgaataaggcaatataaatgataccgggaaaaacaagggcttcatcttgaaagttttcatcaaagcattaatttccacatagggaacctgaaacaaaataggaactatcaacaacaaatcaggcacttaaatcaggaaattcatccaatttagcgcccacaaaatcatttcgttttgtctttgactggtatgtctagataactgccatctagatcagcggttcacataagaagatgttacctgacacatcagatgaaactccccctcatctggatgtataccgaaatctccagaagcctccaaaggaacctttccaaaccaaccattagcgttatgcaggaaaatgcgctggccgcggaaagaaaggctggctgagacatcctgcaaagataatatgaaggaaaaggtagcctgagtcatcaaaaaaaaacatgagctgacatcctgtgtttgtagctaaagataacgacacgagaagtattacatctgaacatctacatggaaagccttaaaacctctatagaaagacatatattatagatcttctaacgcaaaggaaactattataaagacataaggcagcgtttcaggagatatttaaacccaagacttacagaaaacgaagaaggtgcatcatttatatggaagcctagtcctgttacgtcaagttggccatgtaggtttggaaaactttctcctctagacatacatagatgaacctgcaatgcaatagacgacagtgagaaaaaaaaatccaagggcaagccatgtttatttcagaaatttgctcagacccctctacttgtaaaagagaagaaagaactcccaaactctacttcaaagatctgtcacaatctatcatacatatagattccaacaacaaagtgttctctagccaacgtgctgagactggattgactaactaattgggcatatttaacagcacataggaatataataaattacagtagaaaaaaatggaaaggttgaaaacataatggtcattgaaaataataaactttaattcactaagaagacaaatagtggacattagagaagcacctcaccagtagctcttcccttagaccactcgattggaatctctagaattctttcaaaaatctgcagatatgcagaaatgagataagtcaaccatgcaactgatgacaaacataagtcatctattccacctgacaccttaccgggacaaagaagttggcaacatttaaatttgcatgccagttctgctcgacggtatcaacaaaaacatcaacagacaaaagcccaccatcttcagatgttacatctgatctccacatattacagtttccaccaagttgcacgtacacacgaccataatgattctgaaacttaacatgtccatggacgttcctcatttctctacataatagtgttgtttaccaaaattagtcacataaaagacctctacttcactcagcttgcactaagtaaacagagacattaaagaccatactgatctcataacataataaagggtttgatatccactcaaactgaaaaattcgatgctagaaatttgattattgaaagttggagttggaaagtaaaaataagggcatagtatggctgatttagacattacattaacaacgataaatgaccctcacctgggctctgtatcgccataagctaatagaagaagtgtcccacctttaaactgcacagagtcaagcataactggtagtgtcttctcaacataaacagcaggcagcttctccagttcatcgctcaagtgaggagcattcggatctgcccttcctgttaacttcttagaggaaccagttaaaatattaaacactgcttcttttaattttttgttccgtggccagctgggacgccaatggtttgctacaggttgatgctcatgctttttgaacgtaaagtcacgaggctgatttccacttcgattaccatgtggaacatcgtcagtattctgattaacaacattcatagatatatcccctctctgactgcttaaagtctcagattcagaagaattcacaatatcttcaacagatgggcttcgtttagtttgtaagagtgcacagagtctatcaacagtcataaggaatggatcacatgatactgtgaacttgtctaacgtggaagccttttttacaccaaggagccttttacccctcactcgataacctttcccgtccaaatcattagctaatgattgctcaccatacggcacatgtcgatcatattgattactgatttctctatcacctttaactaatagcatatccaaactcaacccatcataatttgttgataacactgaaggctcgtcaagcttttgttgtgatagactgtggaaataagatagagctgctgaagcactgcgctcaagaattctcttctttgcactaatattagacattgaattcttatgtgattttgaattccatttgaatttgtacttcctcgggacttttaacattttggacaagaacttgagccctgaaccaggaatttttatgccaaatgatttctccaattcagcatgcttcacatcatactcaacacctgggtccatgcaatgttgctcagctgaatgcatcttttcatccatgcaaataaaggagttgggatttgcaatttccgtaaaacgcctgtcgtgcttcaccgcattatctttagcttgagagtaattcttacaaggaacgatatagcctatctctgcagcttttcttgcatcattatccctttcttcatcccaacggatccctgcttcctcccttgaaactctcctagttttggtgcgaaaatcaatcccttcttcagatgacaaatggcttggcaaagtagtgtcagatagaggtatccctaaccatgtaaaatctttcttttgtgcaaccaaaactgttggattacttagaatcgcatcaaccacaatctttcccctcctaagactagcaaaaggacggacacaaactttcatagtcggaacctcaccacaggaaaactcttcaccatgaggaccaatggagcttgcttcaagtgtaatgcacaatggtgaaactcttctaacctttccaaaatcaacctcacgctgaatagtctcactaagcacagagcaaacagatggcaaaagcttagtctcaacaaaaacacgagccttgttctgtccataccacaccaataaacaaaccccagagataacagcaaagaacacagaacacctcaagaaaaacaaaccctcttcccaaacaggagccaaagacctaaccaaatccttgcttcgtacgaaaggctctttcaaacatttaacttccattctacttctagaatcaagagacttcctaagcaattgcacatttttcccacaaaattgagaaaatttggcaactttagctaaccaatcattctgtttcttctccgaatatatacgcttgctacgaaacgcccttctagctacattgattctcttctctctgcgattgaaagaaccatgaagcagaggagtagaaaggaaagggttttgcaatctcaaactcattatcacgtgctcatctgctggggaccaagaagtctgactcttagccccctaaagcttcagactttaagacaacccacttctgagaatcttaacatagattgaattggttctgaatgtgtggggaaacaaaagtttcttctatattacagcaaccaactcgaatcaattctgattaatctaggtcaagtttttctagaatgggatcagaaagagattatcagtggtttaagaagagaatcgaagaagcttacgagttcgtgtatgcagaggatagggaaaggaagaagaagaaagaagcaagctgcgtctaaaacttgtgaattgttacaacttattaatgtggttcggttcaaccgcaataaaccactcacgaatttgataacgccgtaccaataactctaaacccgattctcaaagagaaccgaaatatctttccgattaccagattaatccggtccaaccatgaggacattgacctttccaaatttttatcaatttcaaaaattcacaatatgaacatcaaatccttatttaggtaatactttatttatcctatagtaaatatcattacaaaaattcgactagatatgtacatatcaaaaatgtgtcatattttatacatagttaagtaaattattcagtgtatagtacatattcaagacgatattaatacatacagctgatttgatttgcatgttgataacaaattaaagattacagacgaacatatttgaccaatctagacaagatatatttttgtgttcatagttgacaaacacatatttttgggcaaaacggtatgcttctgaacaagaagaaaatataaacatcaaaaaagagtaacaactgattaacatgcttcttaaccgcatgagaaaggaaattcaataacttgatccatatcaccatgtgcgtggattacacaactcaactgtgatcaatgataaagagattttctgatcaagggaaatgggatggtaataatggcacaataatggatatgatcatgcatgcattcatgaactaacattgagaatggttcagagttatgatagttaaagaaagcacttgggccgactgaattagcaaaggaacttaatttaggggttcaaatcgagacttttaggtcgagtcaagcacgtttaagtgtggttaacgaagcacaatcaagtgcggttgtggttcaggtggagtctaaatattgattgatgaactaggcatagtagactaaatacaggttaatgttattattcgtgattgcaaaaataaaaatacattaccctcaagtggggaatcactttggaacatataaccaaaaaagattttgtgacaaggcatgaatcaaaacacaggcaactgaacgaaaaaaagaagaaaataacaccatcgaaccatacataagaagctgattgaagacataatgaacctaaaaaaggtctgatattaagaaaacaaaggtgtttcaaaaagaaatgaaaatctccagagagtagttttgtctttagcctgttcattgtaataagactagaaaaaggattcaatgtctttaactctaagaaccagacccttcaaaagatttattaggacagagactcatatgaacaatatacggcgaaatacatgttcatatttgcatttccatcaagatcaaaatggtggtgattcaggattttaccgcacaggctgttggttatagtgattcttctccttcttctttgccgcggccagcttcttacgtcttgcagctgcctcctccgcagcagctttagctgcagcatccacctctttgcctgacttcttcttcttcatggatgcaagcttctttatcctttccttgacgtcaattggagattcttcctcagttggttcagacccagcagcttcatctacagcatcggcattgttgtttgcttgttgctcttgagattcttttacctccttctgcttatccttctttttcttcttttttgatgcctttgactccccacctgctgcattctccttcttctctccctctccattgacatcttctttcttttcttgtccagcctctgtaaaaagaacatgcaatgtatcggaattagcaaaactgctagacatatcaaacatgctgattttctcagcaagatagtgacactacacaaaacattaatactattaaagagcacaactgtctggaactaagcaatatcagttgcaatggctgtgccaatacgtgataagtattattacagatgtcaaaattgattgaagacaagtgtaccttgagattcctctaggccattgttctccttgggggcaactccaaaatcagccaacaaagcttcaagctcagcaagttccttctttttcctctctttcttggaaagttgcctctctgcctctttaggaggtgcaggaacttcaggagctttcttcacctcaggctctggatgaacctgtacctctgtttcctgttcctgctcttcctccacatcatcatcaccttcatcaagaatatcttcctcactttcactttcctgacaatcacaccaagataatcccatcagcaaccaagataatcacacgcaatctggacaagaactaacgcttacacaagtcaacctacacaaccatgtgctaccacaacataggtaacacacaaatgaaaaatattcaggaaggataaagcaacatgagcaacaataacaaatcctcttctctcagacaatagacaccacacacaaacaatttttgtaataactaactagagccataagcataagataaattaacattagaacagaaaccagctctcagaattcccagtcacaaagagaatcgttaaccaatagacacagaaccatcatatccattctcaaccaatttaggaatcgcaacaaaatcataaaatgtttagacttctgacctcaacatgaacgtctttggaatcagtatgggaaggcagagaagtactccaaccagactgaggaggagcagtggttgcataatagtcatcatcgtcgtcttcatcatcaatatcagcccaagacttaactttcaaaggcgtaggagcccaatagacctgaggctcaggctccttctctggctctcgtgacttagaagaccctttgctcttccctgccttgtcagacttcttcttcttcttacgagtgtccaatgctgcaaacaaattagtgctctggatcgtgatcgatccttcatctctcctgtttccacctccagccatcttaacaacgattcagctaaaaccaagatcgatataaaccaaacaagctttgatttcacacctagaagtctcgacagatatacaaaaggaacaaaaacacctaaaaagataaaaaaagccaaaacagagacaaaatatgaaatctgggttcgttcgatttcaacgcaaaatcaaatctttaaatgaaaatcctatacttttgactaaccactgattgcccagataaagaacagtaacacccgatggatgtataaactagggttccagatgagaaatcatggatcaaatcagaagagaaagaaactgttgttgaagcgatttataagaggagaagataggattagggttttggttcttcttccctaatagaggatgaggaaatctggatgtagcagccgtataggttagggctaaatcgacaaaaggagataacgcgaggagagaagccattaaaaagctcgtgtctctgaatttatattggttatgttaatttacgttttgatacctaacaatttatgttttcttggttttgatcaatgtgttttaggatgatacagtttagcccaaacatttctgggggttaaaagaaactattggaaatacaaaggattcaaattgggaaaatagtaaaatacttaaagaaactgtcatgttcttcaaatttttgttccaaaagttaaatagtttagccaatttttttacataaactaacttgagaagattccacaaaggttgtcaaaaattcatataagaaccgaaataaatttgcttaaatctataagaagtaactcgcaaattcttgttaacttatttcctgtgaattctcgttgtattatctcgttaaattgtttcccgcgaaattttaaataaacttatatgatacgtcattatgtgcataaattataactttgcttaaatctatagaaaataattcaaaaaagtctttttaacttattgaaaaattctttttaatgcccttttcatgatgcaccttttcaactctacccttttgttttatccatttttatttctaccttctttaaatttttaatgaccattttacccttatttggaaattgttttaggttaacaaaataaaatattaatattttttcacctaaaatattccaaaataaatattccgccaaaattttcccgccaaaaattttcgaaaaaaaaatttccgccaaaattttgttttcaaaaatatttttcccgccaaactttttttttggcgggaaatagatttacaagggattttaaaagagttttaaagatttacaagggattttaaagaggttttataagatttacaagggattttaaaagggtgatttacaagggattttaaaaggtttttaaaagatttacaaaagattttaaagggatttaaaagatttacaaaggtcttttaaagattttcaaaggatttaaaattgttttaaaaggattttaaaatatttacaagggtttttaaaagggtttacaatatttacaatggattttaaagggctttaaaagatttacaaatgatttttaaagatttttaaagggtttaaaagtgtttcaattatatgtttctattggatgagggtaatttggtcattttgttcaagggaatgggtgattttaaaaatggacaacataaaagggtattgttgcaaaagggtagtaaaaaaatggtagttttgcaaatctccctaacttatttcccgcaaattttcgttatattatttagttaacttatagtccccgtaaatttaaataacttatatggtatgtcattatgtacataatttatttacttaattaatttcacttatcacattgactaaagtgatcaatttggttaatattctcttatcaatgactatttccaggacacacaatctagattaggaaaatagtaaaatacttaaagtttgggttcaaagtaaaatattataagcccagataaaccagcttgaaaaagttttacaacgccatttaaccaaataggctgaaaacagtgcggcagcactagctataggttgcgaaaaattcaaacacgaatcgaattataactatgcttaaatctatagaaagtaactcgctataataagaatgcccttaatcaggcctctgcatgtaccttttttatttaatcgaagatacctttttcgatgccttcccctcattttatgatttaagttatatgttgagctcgttagtctttgttttgagatttccaagtttggttaggttctacctatatctatttgtatgcagagtgaatgatcatatctaaaatggaacattgttgggaagatgtaggtggatttcttttcagtttgttttgccctatggtttttgaaagtccccggatgatttcagtcaaagcaatttggtccatctcttcactttctttattaataagtaatcacaaacatggtacactgatttatttgaattcattcagagtagatatgcagttcaaagaagttttgaactttttatacgaaagcattaagaagaagagcgaacactacacacaacaaaagaagactttcaagcatgttcaccggattgcgggggaaggctgctcggcttcgctcgcccgtagttccgcatccacaaaaccacatacaaaagatcaccagcaacaaagcctatggcagcatttgatcccaaagagactgatgtgcacataagcattacaaatgcatctccctttgtattcatatctctagccgccattgcaagctctacccctgcaaatagtagcaatgccccgagcacaccaaccggaaacttctccaatatacccaccaatgaacctcccaagaccaaccctagcaccagtttagctactcccaacagtgccacacacccaccactcctcccaccaaacttatactgcccggctaaaccaccagctccatgacaagtaggcattgctccaaaccaacatcccaccatattcatcagcccaacagtcatggaaaccgatgcagccgagaactccttctcggggaacagatcatacgacagcttacacacagccacaacagaattaagaacagaaagaggtaactgcgggaccgtccctttcaaaaacccgtttctccatgcttttcggcttattctcacaatcttcatctttgacggtccaaacttgatgtcatgtacaatactcggcttccttataaatgccaaaacaacacccaacaagaatatcaacagagcagatggcacgttagctataaccttcctcaccgaaccccatcttcctcttcctctcgaaccatctccttcttcctcttcctcttcttcttcaccatctccattcacaagaactatgaacagaacacaaaccaaagccaaaaccaaaccatcaagccctaaccatggcctatcaccaacactctttgacttcgaaaaattctgctctttccttatatacttaaccgcagacatggcaaaagctaagccttgtgacaactgaatccctctaacaaccgataaagggattatattgaacacaagctgcatcaaaccagagatccccaacacgaacaagatccctccggtacatattccggcagccataatctccggtataccgaaatcttccgcggtagacgaaatcgccacggctgctatcgatttcatcggttgaaccggcatggggacaccgtaaactgctccggttatcgcgttgtatatgccggtgaatatcagtgttgtgcctaaatccaaatccttggctagagttaaagcgaggacgattggtatgtaagtaccaagatcacccattgcaccgtttatttcggctagcttcgaccggaaaacaagattcgttttcagtttatggaacattccggtgaacctagaacgtttcggggtttcgtgttgacctctctgagactgagactccattgtttctgttttgtggtttgtatcgaaacagagcaataagcgtatctctttatatcgtatcaaaaaccaaagcgttgacaataaagcaaaaccttgatggcgacagtatctgattctttattgtgtgttagaaaaaatttgccttaaacttatcaaaattatcctttatcgtcaactaatttatttatcgtcaactaattttttgtacttagttgtacgaattaggatttatttatcgtcaactaatttttgtacgaatttaatactggcacatatttttattatatcttcagttaaacagctaacacctgaatttgtagatgatttatataaatctaagcaacttaaattattcatttatggaaagatatttatataaatcaaaagtcaacacttatatacaaataagagctgtgtatttattatttgagttttgaaccggcaatgaaaaagtcgccatcaagtaaataaataaattaattttaatatttattctgttttacaaagttgttttcaagtttttttttttgttttaaaataataatgtttgtactttgtactattagttaaatttgtaagattaagtatcatttcctatctctattgtttcattttattagttagaaaataattattattttacacaaaacccattaagcatataatagaaatttagttttattaatttttgtgatactttggtgaaacagaggaagtaatattaacaaataaagctttatatttcacagatgtttccggtagtcttgaacattcgggtttcacgaattattttatattgagtaattcaaattttgagatttccggttaagagtttaagatccgtttttactttataggaaccgaatgaatttcggatagaatcagttaggcatccaataagccttttataaatgtgaaaatcctctaaaaaagatgagatgaatcagcatcaaagttgaaatatttttaaaattctcaagtatagatgttgagatcgattgatcctagagatgatggtcgatctcttttctagtttgctcgatagatctatctatctttagtggaagtatccatatcttttgacccactaaaggaatgactttaaaccacttggaaatcaaagctaactaatgtggctttcttgtgtccaaaattcaactaatttggtgtttgaatattcctccatttgttatgaaactgatgacgcttcaaaaatgtccaattgctatggaagctcaatttgcactattttcgttttttttttacactaataacctgaaacaaactttagaaactttagaaactatgaatagtttacctattaattatgatgttatgcaaaaacaaaagcctttatcactattttcccaattttatcttctatctccaaaatatgcaaatcaatatatatactttgaagtaaaaaagtaacatagaatataaccgcatacgtatcttgtaaactttttatgctcacatacattagaattttaaaattctaaaagtagagcacaactcttgttgcaaggaattcgattttctatagtatttatcaaacatttacatgcatcaaatttttatatagtagtattgacatgcatcatatataaacgcataaatagtctttaacaaagtttcagcaattacggaaaatgtttccacgcataaaacggaaaagcatttagttttactttaaagattaaaatattagtgtaccaattgtttttgatataactggattgaaatagctaaaagaatgcatcaaattagtataaggaagagaattggtaagctcgactgcattatcttgtgacttgtggttttggacgttgagtctggactcaacactttggaggcatttacttctcagttctcactaatattctcctcgtgcaaatctgttattctttttttttttttttcttccgtttttgtgcttgtagtaaatacacacgatattttttgtttgaaatttattttataattttttaaaatattttttagtacatgtacattaaaaatgcgtaataaaatgtagatagactgagaggttatgtggatcttgaatatgaaaataaaaataaaataatgcaggaataattggtcttacattgtgatgtgacctcagtacattgtaaagaagataatggaggaatattgtcttgttagacgagaggtcaatagaagtcgagcaatttggaccattgagtttggaagctttagcttctccgtactcttctcctacctttaatacttgtttttgttcaaaatactcacaatatgttacctttggatattttgttttataatcgaatatttctaaaatatgtgacattcatatttataaagtaagataatccagaattactattttcagtgatatgaaaatgtgaaatggattaaaaaaaaaatgtgatatgaaataactattttgccactacaaatattaacttttttgaaatacgaagatttagtctcacaaattcacaattctacgactattcaggcagttgtacctgacatcgctgtttcacaactacacatttgttgcaaacgtgcgaccaatttgcgatgatcattttatgatttcatgtggtattctttaagcagcctcaaattcttaatttgtgactcttttacaaccgattaagttgtcttaaattcgatgttgtcttttagttgcagattctttgtactttggctaaatcacactccaatactctattgaacacaacatgttcttagcaaataaacagtagtgatcattattctccatcaaatcttggcatacacgggggactaatatggcgttaatgagcggccatctctcaatcctattgttttaaatcacttttgtaaactaactccctcatgtttcactatgtcggatctcatttcgaaagggctctcatcataccaaaactgaaaaacaatacttgttggtttatgagaaataattatcgtatatattatactataattggaatgggtttatatatccttacaagaaattaaaattaagaaatacaaggataacaaagcaaactaatcaagcatgactcagttcttacaacttcaccttatttacctagtcaacaacaaaactaacaacgatgtagtttcaagattgtggtaattcctcaatcatccgaaccacccccataactccaacaacacctacacgtatgagatagccccgtgaatattggcggcctcttgccacggtcttcacatctgcaaccctccaagttcttagataatccgggagaagggggagttttccaaaatgtgtctaaacataagctacgtccgttaggcccacatggtccataaccctccatagtatagtcacattctcgtatcaatcctcctgtttataatatgaaaagagaagacttattagaaaaggtttttagccttcaaagaaaacatataatacttcaaaattatttaaaatctatatataaaaaatattaccattaacaaggtttttaaggaggaatatgagaaaacataaacctatgaatgaagtagtatatctcattattcaaaaatatataaaaaaatttaggtatcttgcaaaaacttgatatggatcaaagaaggggtaatgtggttatatatggggaagattgaaatttagtttttattttttcatatattaatataggaagattgaaactacaaagattctgtccagttcacttttctgtcaataatttgctccttttttctttttaatagtccatattaattggttttaaatatttaatatcatgatatcttaataatttatatatttcactaggtttgtagaaatttttctattttgaaactgaatccatatcataagattcaatttttcttgatttatatttctgttttcatagcttaattttaatatttttcttaatgaagaggaaatcaatattgggtgttcttcaatcatgaagtttaacaaaattgtaaatccaacaccaatatttaataagatcatattttaagattacatatattttactaagtttgttgaaaattttaatagagaatcaattgtagtaaaaaagtatattgtaatagattttttccatatatataatttattttattatttcatataagtaaataagataattgcccacatttatgcttttaatttgaagtctatctttttgaaaaatatactaataaatacatatatcaaaacaatgattctaaatttataagtcatcaaagtatattttaagtgatgatttatgtattctaattaaggtttttaaaaatattaataataaatgaattttttttattaaaaatagaaacaatcttgatatattttgaaataaagggccacattttaatggattttctttaggccttaaatatgttggatctgctctgtctatatatgtaaaatataaaccttcttggagacaatcacaagctcataacaacacataagcaaacaaaacaaaagagagaagaaacttgcaagaaaatatgagtttgctgcaatattcttggttacttgtgtcttattctcccttctcccaagccacctttcacaaggtattctaatcattctactgaggtttaccattttgctcatcaaaattcaattgacctaaaccagtttcatttaactctttttgttgttgatgatgaattaggtgaagaatcaagcatgaacattgctgcacagagaaggccatggtgtccatctaaaaaacaagtgttcagtggttcgtgtggaatgatggagcacaacaatgtctaaataacttattcagtacatgggatccaagtgtaaggctgagcccaatctcctgcaattgcactcctcaacttaactaccatattctttgtagttgtccgatctaacatgattttcccatacgaaaatcgagatagaaattattcgttgcgagtttgtttagtcactttattgttttggatgctttgtgcattagaacagtggcagattcatcgatatagttcctcgtttacaaatatatcgccatggataagttaatgcaaaaggcaattggaacttgtatatagataagataactatggtggtggtgatcttagaggaattatcgcatttagttcttaggtaaaaagattttgatttttaggggatgaagtagctatgcaaatttcataatggagacatcaatatatttcggacctctaaaacactaggaacggctctggctccaaagatatataatgtgacagagattgactctattttaatgtgatttgtggccataacaataaacttgctctcagtaatgtattgcagtgtaaacagattcataaagccagaaccaaaaggctttcttttgcagacaagatgtacaaataaaaagtaataacgcagcctcgaaaaccatttgaatttcaacttctaaaacttgaggagaatggccaaaactgcggtgtgatcaagacagccaaaactacagtagcactaagccatgaccagctgctgcgtagattgaatccgaagatgctgctattctgtttgcaaaagatataattgtaacaatatagatacaatacttatttttaattaaaatcttcatacaaacttatgaggccatagaaagaccctcaaaaacaagacaaagaaaatggagtggtttacacaatccctttcttgcaaccaacactctaaacttatttagttaagatcttagtagtatccttcaacttcgacatccaaaacaaacaaaaaaaacgaaacccattacaaaatatacaaaaccaaagccggccaatccatccgtggctgctgcagctgctaatagatgtgcataaacacagctctttgtagacggatgaacgggtttagtgccacatgttacctaacattggcatgacactagtcaatacatatattataataaagtctttaggtagttaaaagacgatgatcgggtctataaaagctcgtcccatggccatcgtcatagctgcttcttgttcagaagagcttctttaaagattcatgcatatctatgcacggctcttccaaatcctcctcatctatcatcatctcctctgaacgacactcttcactgcaaaatgacttctctctgcaaaagtgcaaattcataaccacacaaacatcacaagtttagcattgtattccaaatatgtacttaacatcctctaacttgcgcaactcataatcatcctacatatggtagatagtattggtattggaaaagaagcacgcaccgatacatatatatgtcgtcgccacctccgagtttcttgttgcagaagttgcagatgccgaggaagttatcggaggggaacacagaaccaaacttctctttattatcttcatctccctttaactcattcttgtgacactctaaaactcggtcaccatagatatgagtggttttcgggttaggaccatgtgcaatgatacaagtgtaatcctccatatcatcctcagaggagaaagcattgtcagaaccactccccgggaagtctccttcttgtcccaacttggatcgagacagaacacgggtttttcgcagacaatcattcgcagaaaaggaccggtttctcaacccaaccggttcagtctcagaagagttatcaccgatttcgaaaacaacaccagatctttcattttcaatcttcttagacttgttggctacagggaacaacaacttgggatgtttgtccataacctccgaacatttgatcctcaaagccggtccaaacacgatatccggtaacaaacaccgatcatcgccaagagaatcaacaatgcttaacccaactttagcagcagggccacaacaacagttaagatgagcagtgagtgatgatcgaggagatctaaggaaaaatgaatcagccattgtagacaacaccctaaattcaagaggagatttgggactcctgacaaaatcagaatctgagatacacttgttcttgttgttcagaccaatcaaaagactcaaagccagtgggttagtgattggtctgttgttggtgtgaccgacgacaagatcagattgtggatccaaagacagcgacattgcttgatctttgtgaggaaacattgctcttgtcttcagcattttacggttatgatgtttcttcttcttcaatctgtttcatgatatcaaaaaacaaacatcagagagattcataaatatagattaagccgactaattagcatcagataagtttttaaatcataagtaccgtacattttggtattctagttactctttttttatacaacaaaagcaaattatcttagaaagaaccaaagaatgagagattttcaaagaatatgccaaaatattccttaattaaattcctcagcttcaaatcagcggagaaatatttgtaacagacaaaagaaaatgttaatttttcatccttattaaaatgtaattattaaaaaaaaaatgaactttgaagaaacaacatgcaaagattataactttggtaaacattagaccaataaattttctaaagaaaccaaatttgacccatatacataaaaagtactataaatcaaaaccatttttctgactgagaatgtgaaattaactttctaggttttgaaagagtagctttttttgtgaatagaaatcaatttctgagatgtgttttcttacatggatcttgtaatctcttctctcaatctgtaccgactggggaaaaagaacagaaccggaagcagtagaagacttatgaaagaggagaaattggggaaatgaaaaataaagactgacccaagaggataatggatccggatctatgggcgggtcaagaagatagatccgaaagcgcgtgaggtaaagaggtgttatcagagagaggcttttttgagagaataatttggctctcttcacactcttctctataccaaattttggctctttttgcactgttcccactctgttttgtggttcttataatattttttgtttttgtcttataggtgtcggtttcatacgcacttctttttaaaagaaccaaataaatattgtataattttccccaatgttacactttgggtctttagccactttggaatcaataatcatgtttaaaatagaggataacaaggaagcttaatggtatttagtgaatttttgattaatttgttttcttttcttttaatcatttaaagctacaaaaaccattacattatgctatgataattgcaatatataaatatattttaatagtaactacaacatcttatataattttaatttatttatgacaaataatttgttgctaattgtaaaaattgatttaagttgggttttacacttttactcttactttatttgagtacttaactacttatagatagtgtttgagaaaatagtccaaatgccccaaactttcacgtcccattttttaaaaaaggccaatgttatataaagttaacataagggccgtgtcaaaaaaaaaaaaaaaaatgttaacataaggtaaaatgtcaaaagttggtcacaagccactaatcacgaaccacagggaataagttattttctactttaagaattgttcaaatcaacattgcttcttctttctcagtttttataaaacaaatcttatgcatgaatgaagtcagtaaaaacacacccactagaccagatctaccgttgatcccaatttaggctgactttaaaccaattctagatcacaaaaggcttagtttttatgatgatcattttaagcatacttttgaaacttcattcaaacatagaacgcatgtttttgtgcttattgatttgtaagaagtcatttctaaccaaatcatcatcaagaatggtggtgactgagaccatgtcataaagtgttttacccatggatttaaccacactgtgatggttacaatgagatatatgtcgatagattctttcacctcttcgatcagagttttaaatcaatattatagaatttgagactactgtttatggactatcaagttgtcactggttcttaaagattcgtcaacattttatttatttatttatttttaagattcgtcaacattctctaacattttgaaagaatttcacctgtttaggcttaattattttaatcttattttctttattccttagtagttaaagtttatggattctttttcttcgaacatttaacgacaaaaaagcttgagaagaaaaaatacaaaacacaaaactgttgtattggtaggaaagacgcgtatacgcggagaaatgttcatggacactgtcaggatctcattcattatttcatagattatattctctttttatataactatttcattgtaaagccaagacattttagattcaagtaattgagaattgaaaatagtacatgcatcagatttaagtcatagtcgttgaaaagaaaatcacagcacaatcacaacaatatgtttaaagcatcaaagtacgacaatttttggaagctcggaattcaactactgttttgacatagattttttttttgggctagtgcgttgataataatggcttgtccacacaatctgcttattagagatattactttgcattttaaatatttacgatataagttttcaaatagaaaaattatttagttttgagactaatctttgctcggactcaaagtcagatatttatcaacaatttttctttttaatgaatgtaaaatttatttaactagatggtttttgtgaaaactaatatagcgcagtaaggatttagaattgttaagcccaagtcgagaatgaaagatatataattccgaactgtgtggttgatgacttggatctgataagtattgtcaatgatgtggcttactcaccatgttgtttcttgttgcgttctcgccaaatagtgtttatgaaaactaacatagcgcaaaagaaattgagttatatctttgaacatgttttccgatatcagtaaattcaattctccgtctataaatatgtttcttcatgacattttaaaaattaaataacagtatttttaagctttgtatctttaattggactaaccgaatctatcaaataatctaatactcagtaccaattaagtgaacaataaatactagatccgaacagaatcaaaaatctgaaccaaaattataaaatatccaaataacttttactccaaaaccgcaagtaccaaacttaactgatatcaaactaaaaaaaaaatttagattcaacacaaactaaaaatatctaaaaatattcaaaatatacgaacatgttcaaaatctaaaacaaatacctaaaaatactcaaaatatttaaaaatatctaaaaggtataaaccgacataaccagatccgaatcaaaatcgaattgcatttatgttagtgcttacatgaatcataaactacaaaaccgctaggctcttatttattctggctgatatggggaaataaaggtagataaaaaacaagaaatatatcgttatttagttatttcaataataccacgtgtcaagttctaaaagtatagcctgactgctgacgcgttacgccatcattctcctcgcttgcacttcacattttcctcaaaagattttggtgaactttaggacaagatttgtcgttttgggtgcagcaatcactttcttttattactttgtatttgagacttttgcagaaccatgcaccgacacaagtcagattcactattctcagtggttgagagaatccaacggcatacaaacaaaacataactcgattatccacggttactgtttcatgttttatttggtaatgcgttccaaaacgctctatttttcaatttggtttaaattccaaaacactctttcacgtcatagtgtttttgatggggccctacattctccacacgtgtgatttcaggtgtcagcatgtgcactactcattttagattcttgtactataccaatgagttttacaaattttacaacaatatatttacttatatgtattaaatgtgtgaaaatcagttggtaagtatttaaaagtaattcttttatgtgaagggttttgcaaagttcttgccgatgcagttacaatgtcttttgctccttgcacatagttaagctaggctagccaaacccatgttttgtccataataaaaattgcaaagttcatattttaatataattaatcaattaataaaaacaacaacgagattcataattgtgacaacaataaattgtacaattaatttaattaaactttgaaaacaaaaagttaaggtatctttgatttcacaattctatattgaaatcaatttaaacaaataatcaaggtatgaaattaatttaaaatctacaatctattaaataaaatattttttttgaccaaatatgttttttactcaaaaaagaaaaggatattcctttttagtgaaaggatatacaaacataattatatatctgccataaacagttcaacatttttgtaatataaaatgaccatgcatagcaaaacaactatcacaaaaaaaatctcaaccatcacaaaacgatagttaaacttaaaccaacaatttctaccttcttccaagtttctggttgtgatatatctactccctaatttctacttttaaagggaagtcgaactaatatataattgtataacttgtcccatggttataaacatatgcagcgaaactaattggtaatgatgaatcaatatggtacagttcttccaaactacatgtcacgatttgtttctgatattttataacttaagttgatcagaacaattttcagttctattatttgatttaagttttatgattctggtattctagtaaagttttttcaaaatatgtcaaatgactgcatttattttttcctcagttctacatatcccaatgactacatgtctaaatatatggaaatattggagctacatattgaaattttaatggtaaatcccctctcctgtatttaggtcacatatatatgttgtccataaaaaaaaaatgctgtccatgagctaaaatataattatatcttttaacaaaaaaaaatttaaattccgttttaaactaacaatttgctgaataataacagtgaatttttaaatatttttttattctaaaaggcaaaagtgaattttgtaagtgagcgagtagctaaatgtgagcatgcatgggaaatggtaaaaaaagaagagaaattgatcaagacaatacttcaaaggtccgaacatcttcatcattcgcaacatggtccgtatggtatttatatatgcattagttatataattatctatatgataattaaactctatatataattgacttatatggcttgggtttaattaattttcttttttctgtgattctgcttgtagtcgaaattcttaatttgatggttgatgtgaagcacacatcaaatgtgattatagaagaaagatcatcaagttcaaaaaaagtaaacaaaaagaagaaaaaattagaaaatgattgatatgatcactataatttatgggtacatatgtttaaatatcatttaatagtgtaatgaaaatttattgagataaaatgaggctaagaatttggttatgattggatactgcaagatatatgtctatctctctcctattatttgtgatgtcggtgatatgaacatgaactataagtcatgtcctccgcctccactaatcatctataaacatatcaaaatagccacaatacccgtttgtgtattgtagaacagtcttccatgtatgtcagaatccaagaacatacaaaccctaaattcaaaatcctagactatacacgagattaattcagaatcctggaaagggtaaatcaaagcctagctattttcgaagatctatgatacagtgatgatcaaagatgttgatgatcgaataagtcaaattgaatattttccaacgcgatgcctcaggttgatcaatgatcatcttccaagaacgaaaaattcaaaagatcttgcatacaaaataaaggaatgagtcacagactttaggaggctcaccaatattatttagaacatttcatctgaaagtttacgatacaggtcatccttagcagcttagacaaaaaggtaaggataacacaatttaatatcacattcaatacaagtgcaaaaaaaatagtttataaagaaaaaatcttccatctatcccccacacaataaatcatacacaataacaacgagattcatactttatgaagccatcatttgagataaattaataaatgtatgatctactgtgtctattgactttttgtttttagatttaggttctgttattttgttacgtatgttcataaacttttaaaagtttgattaatgaaatcacattcataatttcgtaaattgagtcgtgatctgatatagtgttattgttaatgtagaaacaaacatgaatacaaaatcttttctaagttaggaccaatcattttaaacattcagagtctatctacaaaaagatataataagcaatcaaaagcaatttaacattattactaacctgtgttttattttcgaaaataagtcatttgtcactgcgactaatgcttctaaatattgctataggaaacatctatgattgaaaacatttgacttagttttatataacactcggaatctatcccttttgttttaaagattataatgaactcttcttacctttgtattggtaacaacagagtttagtgtctttcttaccaaacattgaccgttctcatctgagatatacaagcatatacagcaaaacatattagttggtataagcagaatcatctgaattatgccaatcatgtacgagtttgatcaatgtataaggaaagcttatttttaatttcactatcaccaaaacaaaaccatttttatattggttcgaatgatgcaaaaggtcctttcttcctttctgtaaccaatttagttatacataccaatcattttataaggaaattcaaaaaatctatatcttaagcagataagaaaggaagataagctcttaccattggatttcagaaattgagactatttcagatccgaccatgttcatctggcctcatatcgtctatggctcgggcaaacatgttattgtatcataaaataaacgtggcaaattggatatataaatacatcataattatatagcttatatagatagacgtattattatctcttttctgttttttttgtctgtgaaatcgtttgattgataatgcatattactttgtgattttatgtatataaagtttagccgggattgaatgaagaaaatgtgaaacacttctgggagttttgtgacaaaagagattggaagcaaaaagaaattcaggcaaaataaatttctcttattttatttgttgatatcaaatgttcttaaattcttttccaatcactcgaacgcccacctgttctcattgcgaacctcggcctcttcctcaggtgtgtagtcgttcttgatgttgaagtgttcacgcatctgcgctggagttttgcctctcatctgatcagccacggccttgcacgtaaggtcaagaagtccactgatgttcaaatagttggcagcctttataaaccaagacgattagtctccaaatcaaaacacaacattcaataatataaataaaaccctaacatagtcatggaaaaaatataaaaaaccctaattctaaaaacataaaaccaaaaaacaaagaaaaagacattactaacccgaaggagatcgaagagagtaggatgatcaactttgacgaaatcgttgtcccaagtcttgagctcgtggttctcggtggaaccatagaaatccttgtctccaccagcctcagcagcggcttcaacgtgtttcttgcagtactcgataaccttcgcgaggatggctccggtgacattgggaagtggaattccgttatcgacgcagtcgtcctcgatcatgtgcttaatcgtctgggactcgaccgcgacggcttcctcgacctcgaaggattcaccgtcggagctcttgaggatgatcatcttcttcgtttctgccatcgtttgcaacaaggacaaaggactagacaagttttgaagagaatcggctctgcgattgattgtgaattgtgtgatggtctcaaggtttgggaagttggtgccctatttatagatctatgtaaaaacaatttcttacttggtaattaaagtcggttgattgcttttatgttaatctaatccttttaataataggaaaacaataaaagggaaacaaatattggaattttaagtaacaaaatctttattatttttttcttttaaagagaaatatttttacttttccaaaagctcaaccttagtaataatatttactttccagatttacccgtatctgatttcagaaaatacagttaatcatctactacgtgtgaaaaaatcattgactagggtcttatgttttaataaaagtaaacctccacgttcacatagattatgaattaattattatttgtgtattttgtagtgaatatcaatgaaaatgtaaaaattggtaaccaacaccacaatttttttaataaattattatttactgggtaaaactacgttacactaaacaaactgaaattaacgaacattcatgggttttggtttttaaaattgttggagaaaaatatgattatagttttagttaatttttatgttcattttgtgtgtgaattagatactgttcttttctccattcagatgatcttttaaattattataaacgaacgtcaatatttatcttcatttagatgaatcatcgaatggaaaaacgaacagtactttaaaagattagcgagaaggatcagttggatggtttttaataaactcatttaaaaaaggaacagaacagcagttaacggaagctgatttaatccaaaatacgaaatgtcataaaatacacctacctaaaaagaattccagcaaaacctaaacctatttctccttcattcctcgacattcacttcgccggacctcttcactggatctctcactagaattcactcctatctcttgccgtaatccactattctttgccggatttctcgtgcgttctctctctctcactcactctctccttctatctctctgtttcatggatttgatttcactatttctcactctccccttctacctctctatctcttgcagtaagactcacgggtttgatttgtccttgagtcattagatggattcgattatttattttagctcgttttggacaaagtaagattcatgggttttgtattgagtttatgatgcttataagctataattttcatgggtttttgtatttgtcgagattcatgggtatgagctgattcatgagttttgtatctattgtgtatttagaaactgatatgctttagaattgtgtgtcagtttagggtataatttaggtcagtttatcactgtcaataaccatctttcagttatatcaatgctgtattttcatctagttcagtattagattgtttgatgaaaagtaacaaagtatcaatatgtcattactaaatcaggatttatatgctaacagagttaagcttagatttgggaattaacaataagctgcatcggtagacataagtcagagaattttgttatacttttaatgtcaacaattttgcttatggaatcagtcggataattttttgcttgtatacatgagtaggataaagctgatgatgttctgtatcttgattgtgcctttatttttttcggtattgttgctttacccatagaccaatccctggtttcaacttttgtggaagcagcacctgttatggtattgacagaatcttagaacaaaaattataataataggtcttgttataatgcattggcaaaaatcatatcttatgtttaattcatcaaaatcataaatgaaaatagcagtatttcatagcatagaatcaaaacatgatagttcagtgccaaagaaaacaaaaagttacaaatgaccttgagaagtttcacgacatcattttattacctgcataacattcaacagtggagaagaggtaatatgttttcatgtgtccactagttttcaatctaattatttcacttagaatacgaaattggtttttcttgagtttgatttctttctttatatgtttgtagagtagatatcataaaaatggaaatttaagggggatgtattcaatcaaacatttcaagtgatttgttttaaaataacaaatcctatgttattcaatcatgaatttttaaaagtttcatgaaatctaatgttattgaattagtgattttaaaatctacttaaaaatcctatgttattgaaaacatttgaaggattggatttttgatgactttaagagacttaattgaatacacttttagcggatttccttagttaaaaatacagaattttaaatcccatagttttaagtggaatttgagaggattttataataaatcataataacttccttaaattcaccaaattcttcaaaatcatataaaaactcaaaataactcaaaatatacgattgaatacacccccccccctaaatgtcaaatataataatttgaatttttttgattgtaaatatgtatttgattagtaaaataaaaaattaatatggttagaataagaattaaaatatagttagatgaaaacatggacattttaatcgtttttcatattagaagtaactagatggatcattcagctgaacaaacaaacaaagttttaatgaaaaacagttagatgaatcatccagctgaactaccaaaaatggaaccgaacatcattcagataaattagtcaaatgtacgatttggatagattatctagatgtacatccgagagcaaacgaacaggacctaaaattgggctagtgtaataaacaatgtggggtggccggccagattaatgcagagaaattataagccttaaaagtttttctttctcgtcattttttttttattggagtccaaaactcagtataaatgggcttgtattgggcttaactaaatcttgaggaatcagcccagagcttggccacagctctcctctgcatctgagcattgctctcgtttcagattaacaacaacaggtttgctggttttaagacaagatctttgtcttctgatttaaaaattgcaactttaactttatacgaatagcagcaagatgattgatttggctactttatagtttaatggaagcagttcgttcaacaacaaccttatctaattttcatctactgaatattttagtcctgcgttctctcaagcctctgcatcgtctatctttctctttctctgcctcaggttcgaaactattaggacatgtattttattgctcattagtgaagtttcatgtttgaaactgatttaattgatagagttctgctttaatttagtacaattttggttttgttttgatttagcaatggagagtgatgcatcttgtagcttagttttgtgtgggaaatcctctgtggaaactgaggtagcaaagggtttgaagaacaagaactctcttaaactcccagataataccaaagtttcactcattttagaatctgaggctaagaatttggttaaagatgatgataattccttcaatctttcactctttatgaactcgattataactcatcggtttggacggtttctcatttggtctccgcgtttgtcttccactcacgatgttgtttctcagtaagcaatccatctctttggtttcctctttttaaggttggttggttgattacctttgtgtgttaaagatctgttttttggtttctttcagtaacttctctgagcttccagttggttcagtttgtgtcactgatatccagtttaagggtcgaggcaagagtttttttgaccaattttggattagatagtataataagcaagtggaattttagatatgaaacttgaaactctgtgtgtaattgatgaatatgcaggcagaacaaagaatgtatgggaatctccaaagggttgtcttatgtattcttttactctagaaatggaagatggtcgagtcgtgcctttgatacagtatgtggtatctcttgctgtaactgaggcagtgaaagatgtttgtgacaagaaggtatgttcttgaaaacaacctatgtgttgtgttcttgatcagttgcatcggaaattagctaaattgtttgaagttcatcaatttcagggtttgccgtacattgatgttaaaataaagtggccaaatgatctgtacgtgaatggtcttaaggttggaggcattttgtgtacctctacgtatagatcaaagaagttcaatgtcagtgttggtaataagcattactctttacaagtttatgactgctcctagtcttgttctactttgtttttaaagagaaaatgacaaaactgatccttcttgcaggtgtggggttgaatgtggacaacgggcaaccgaccacgtgcttaaatgcagtactaaaaggcatggctcctgaatcaaacctacttaaaagagaggaaatccttggtgccttctttcataaatttgaaaaattcttcgatctattcatggaccaaggtaatgttagaccatctttgtgagcatctttgtcacttttgatgtatcttgttgatttaattatttagaaatgataaatctttattatctagttttgatcccatataatcagtctatgtcatcgcactgcactttccaggttttaaatctctcgaagagctttactacaggacatggctacacaggtgactgttatgtctttgattgcattttatgtctgtttgtcattgaatggtttctgttatctgaatcttaactggttctatttttatgcttatcccattgtgattataacatgtttacttagcgaaaataatcttatttttatgtaatgtggtaatatacaatggtatctggctgcaataagaaactaagatctcttcaaggtcaagaagaagacactgttacttgccaattactaatgtagcttttattgattcgtggctgtatcaatttttcttaatacatacacattgaggtttagagattacaaacattaccatgtacttacaaatatgcagcgagcaaagagtgattgttgaagacaaagtagaggaccaagttgttcaaaatgttgtgactatccaggtataattctttttttttttttttttgcgttggtttatatacgaggcatgtccgttcgcatcatctgaatgaaaatgcaccatatgttgtccatatttggcatttgcattaggctgcggtatccggtcattgtagcatggttctttgatcctcttttgcttctccttttaaaatttgcagggtttgacttcttctggatatttgctggctgttggagatgacaatcaaatgtatgagcttcaccctgatggcaataggtaattcttttgttgagctctaatgttgaaatcgattatcactatacttacattattaaatctaatgtaaaatgtatgttttcaattacagttttgactttttcaaaggtctggttcgaagaaaaatatgatccaaagattttcttgctggtgaaagtagatgttgtgcgttgttttagtaccatggacacaactattatcagttccaatttttcaatgtactgtggatagtcctttattccccttgtatccaatttctggtcattttaacccgataagaggttcttgaggctacacgtacaagagattactagatgggacatcttaagtttcaactttattttgctttacctctatgtaacaacacagtactttgttgcataatctctgacgtgttaactcttgaagtgaaacatacgacatctgattatctaaagagtttcgagaatcccatttttcaaaagtactgactatccaagtctcccagttctgcttgtactaagatttcacaccataatgaactacttctttagctgcattcattgaaacacattcttattaacctgagtttctgcgcttctataacttctataatccttgaaaaaacttttcaagtgatttcatattcgatactttgttgcataattaatcctctaaaagcaacaaatacaccagatttaagtgttactagaactgcaaattttgggtatccaaacaaacaaacaagaagagtttatttacagtagcgatcagctttcttcttgacgcgatcgtcaagagcatcttccctggattcgaaatttgctttcggaatgtaaccgaacttcttcgcctccacaggaaataggtcatcgtacttcttcttcttcgccgcatcaattgagtatatatcttcatctccagcggcagcggcgggagggggtgaaccgtcaggagctgtcttcgctccatcctcaacaccgtcgagcttttctttgttcttcttctgcttcttcttcttcttcttttcgatcgatttccttgtcgctagatctcctcctttgaacgccaatcttccaccattcactctctcgtaagggtctgacattgctcgattaggtttttccaaatctctctacttctgttgcttttggaattttttctacttctaataaaatgctgaaacgacgaaaaggagacttgggccatcaatctggtattgggcctaaaaggacacttaggccatcgttctgttaataggccgaaaagataacctgttttatgtgtgttttaaaaataatttatttattttattcaatgcacgcacccttctactctttttttttttttgtaaaacaatgcaccttgaaaaattatatcaaacgtcccggtaaaagtaagaatttttatacaacacttacatatgtgtcaaattccaatatagttttaacaacaatataggattaactatgaaactcaactgcaaaaaagccgcaagttatcaacctcatacattcaatagtaaatataccaaccatataaatttttacaagtagacatgtgttacaacacacaaaacccataatctcacatgtgcgaatcatcagttaatgatcttcctatgagagactgaaccatttccctccatgttcttttaaacaatctgctcccaaagtttcaagcaaaaacctcacaaggcagtgtgtttttcctttttttttgcaagaaaaatttagccaggaacaaatacgaggcaagaacaatcgctaatctgccaaaaataaaagatgtatacctcgagtttttatgttggcttctattatcgtgtagattacagggctttacatgtatttagctagccattgcttgcacatatcgagtactgtgtgcgaattggcatgtaaggcttgatgagctacatattgaacatcagccacgcttccgcttttagatgcaatctggaatgcgcttttcaggcggccacataccacacaagccagcacctttctgcactcgtttacaatcagacgtgtatcagcctaatgatcccgcataattgtacagtgcgattcaatttattacatacatgagcacatctctgacatagagtgactccatgagatatgattattcaacgagtgatactattttcaatgggctggatcatagtggaaaaatatgaaaacaattataacagtaaaatatcttaccgatggctgcttgttaacatgtcgatgagacggtcagggcgctctttgtgcttgttggcatatatattgatggcagcacccaggacctgcagcatttcacagaatataagccataccgaacgagctttccctgtatctgaaaggttgccgaattggaataggcgtatagaaaggtacatccaacccaacacccatatttaccaccggcttaaacagattgacgagaaaatatgtagcttaaaaacatagtcttttggccaataattaaatatcgttttgtgtaattcccaaaaagagttttatgttggaccctaatagtcttgaacaccagcaatgttcagtacctgatcccagtcatcatcctggattgttcccttaatgtttttgaaaagttctgtcaactgactgcctttcttcctatcagctagtgacgtagcaacaccagcatatatatcaacagctgcttagaagcaagggaaaagtcagataccatgcacaacaacattacacagatattaacataaaacaaataagcacctgagagcttgaattcatatataacagaataagctaagtcgaaatttttctcaacaagagtctccactatttcacatcttctcctgaaagtaagagccagggaaagacatatcagctgaagaattttctttaaatcttcaccaaaggaaatatgaatactaagtttcgtctttcattttcatttggagtagcacatccttcaaggattgcaaaaaaaacacgtgttcaatttatctcgacaagggaaaagcatccacatcattcatttaatacgcatcatggctatgtgaagagaaagctggaatcgatttagaaatactaggtaagtctctctttgggtgtcaaacataagtggactggaatcatgatgacagtgtggaaagaattacaggtctataatctaccgatacatattccttaaacttgcgtaaggatacaagaaatttgttttgaggacaaacctggatgtctctgaatcatttggatttccaaacaaggaatgcttccatggtgctccttcagagtcactgaaggacttcaccacatcaatctataggaagaataaacccacaaaggtggagtcataaatcaaaaaagccctacttaatgaaaaggatgacataaacggtgttcagacttcagagttacctgcattttcacccgtgaggacaacttaacaagagtttcttcactcagcttctctgcggcactttttcctctaacaccctttgtaacaagtttttttgagtctgaacctctatgacgcgctgtcaatgcttcttcaaagtgtgcctgtaccccgaggatagttagagaccagtatttctagaaaaaaaaggagagaaacatgcaacatagacgttatcatggttttgtgcagcactggcatgcttatgactgcgggctgttcttcgtttaggccccaaaacaagatgtaatatataattcatacaagtagttatcacatatgaataagttggtttaagcaacaaaaacttgtcttaatgtaatccaggcaaattttagaaaagctctagttcaaataattgcattatatttacttatttagcaaacagagagagagagaaaaaaaaaaaaaaaagcaaggattaagcgtgtctgatccaaatttttgtgccaccaactgccagaaaatcaacaaagtcttgcctaattgtttcaaccgactctaaaccactttataatgcttaaaatttaacattccacacacaaaaaaatgcatttgaaaaacctgcaatcagtaaaaacatactttggattcacttaggtattaactgttttcagatgggcattgcatgtaaatacattgcggtaatccaattcagactcaacacagatggaatgggtggtgaggaaagagctactgactagatacctttgcatgctcaagatgccttacagcatcctcctgagttgtagaattcataaaaagctgaatacaacaatacccagaggtgacataatccttcttgagtacctgaacaattataaaaatgagtgaattagcattatgtttcacaagtattttagaaaaaaagttaggctcccagtatgtagcatacagctttacgagccacttgtctctctaaacagaaaaaataacattaataggccatgatcgacaacacatgatcacaaaaacgtttttgtttcatcagagttaaaatttctaccaataccataaatgcacagccttagtcataaaaatcatactataaacctcttacaactacaggatctgcagttttaaggatgcactggaaactaatttcaagcttaggatcaggggttatggttcagattgcagaagaggaagtgcaaagcagagagaataagactagctaagaattttgggataagatgcacagttgtgtactcttatatatgcagtgattatctgtctacatgactacatgactctataactgtacagcagaacctatgcgcatgcagcacatgaaacaaaggaaatttagatctagttacttgttagtatagcaaaaggtgaaaatttccaagtggaaacaacccaacggtaagttatagttaaagaaccatgacagcaaagatgaccttaccagaaacttgtataggtaattgaaatgccggttgatctcaaagaaagcacagatacgagtaagagctccagctatgtactgatttatggcttgatcttgattctttgcggattcaagtctttctgtaattacttcctcaagggatgagatagctccataaccaacacagaactcgcacaaactttcaatggtcccatattcagttgccaagggatcagttcgttgaggtgatgaagatgtgcttactgcgcccacagatgaagtttgcaaaggagggggaagaccactttgcggaaagaataacatgcatgcatctttaaagtgaccatggcggaacataaacccaagcaggttttggcgagcatgctgtagaatcagaaaaacaaactcaataaaccaaaacaaaagtaaaatgtaaccagtgcaaataatgctaatttcataagaactcagaaagcactcttaaaaattgggtccaccaaagactagttcaagtaagataagtatattctgaggtaattccaggagagcaaacttgcaaattccagaatgcactagaatattattgccttacttcctgcaagtagttggtgcactcagaatagcgtgtagtatccaagttgcttcggggcccatcttcaaagtctgaaccaggtacagaactattcttttccgattccagagatctccgcgacctctctgaacgagggaaagtggatggcatatgcagaacatttaggtatgagtctgctgataaagaatcgtccaaaattgtaggtgcgcttttcgccaaatggtcatacctgacacgtgtcaacagtcccaagaataggatcagatagtggattaccaaagcctttaacctttttcttcaacctatatcaatcatgattgtattttcaattctcaacaattttacaattccttagagcttagctaatgaagctgcgtttacgtacttacaaaaatctaattcattttgtgttcaactgaagtttatattgaccaaacacattccgggttctgtgactggattagcaggatatttttacaaaatatgtctctctactacgcccatactaggataacagttttagctaaacagagacacttacatggaacgtacaattgacacatccacaggcggacctccttctattgtatttattatctcctgaatgacatcaggaatgtcttccccctttaattgaaaggcttgcctataaagaaaacaatgagaactgtattacagcacgcaaattgaggttgcaatatgcaaaaagagtgttaaaattcatgtgttcttccgcagcattaaactatttcatacttgaatttgactcgagcttgagcatagcgctccatccgtaacaaagcaagaccccatgctttccacacggggaaaacatcaatctgaaattaatcaagtaacacacgcagaagttattgcgaatttttgatgaagtggcctaaccatggattagataatcaagtataaaattttaccttgcatttcttgcacatatacaccgccatactatatcgttcatcagatattaatctgtctcgtagacattcggatgacaattgatcagcaatgtcatcaagagaagtagaaattccagaccctaagaggctctgcagcaactctgcgcgccccaaccagatttctgtaagtgagagaacatccgatggttcatccgttgactgactgccaacactggagctgccagcatcagaagatatatcatcaacatctctacttctttcaccattgttattggtcgattcagtggtacctagaagctttctcagcaatgattttgcatacgacaaaccctgcacaaacaggcaaaaaatagttgctttaatcatccaaatcaggtaaatgaaatataggacaaacaagatcaaccacgtatctccctgatataaaagacaccctccaaatatgattcggggaagataattaaaataaaaactgtcatacctgcacaaatgcctccgttgcatgatatgctcggccaattgtttcaacagacgcaccctctgacaactgtttggagctcaatacgtttttcatttgactgatgcataggtccatggcacttcttgctgatactagctcatctgaacaaagtgatagtagagcctagaaggagagcagtgtcaaagaagtccgaaacttacacttatttccaaaagtgtaaataagcatagcaataccttaaagagaataatatcgggggtgctttcatacttgtgagatgcacgaacaccttcatctttggttttgtcgccagttagcatccattcttcagcaatagaaacagaaggtagcctatcttgcccatctgccgaataagatgatccctggtcctcttgaatacctgtcatcgcctcccatgcagctctctcagaagcccccagtccggaattctttcttttgcgataaacatcctttgacgtcgtccggttttcagcattacgtggagcccatgagaatgcccttcgagcctctctctgaaaattgcttaagctactagtgaaggatgcttttactgctggccctgctcttgatttctgtcttaaccttgacgcagacacagttattcgaggttctcttggtggtgggataattgtcacagaaatagcttttgctgcataggccatgataacattgttatctcttaatgctgggaactctttgagtatctgaaggaaacgtagaagtcagtctcagagagtctcaagagcaaacagagcaaggaagcatagaggaaattactttttcaaaagatatatagacatgaacaagagttatagaagtgcattttcacaagagtagagatgatattcagaagagtagcacaaatgaaagaatcacggaaaattcaaaagaagattgtttctagatataccagtgaggcgtattgtaattgttttctcattagcagagcttcaaatattaaattgggatgctcatgaagcgaagagcatctctgttgccaaggaagtggtaatgcagctaacactttcagacctaaagcccaagaattaagccgggcgacttccaaatccgacagattgctatctcttcgcttgagaaagaaatggacctacagaaagatgaaacaaacatttttcaaaaagccgacagaaaaatatgaccttgtaacacaatgaaaaaaaaggaaaataaagttgttaccaggagctgtttcgaccgaaggtcaggtaataattgcattgcacccataaccactggtagagcatcagccgagtcttgaagtgaagataaaaaccgagatgcttccgccggaccaccaccattgagtggatcagtggttagaagctttacaagctgccgtccttgtaattctcttctaagatctattgataatcctgcactttcagccacttctagcgcagcggaaacagctcctttcccagccaatcttagagccaagccttcagggtcttctttacattcggcttctacctgtttcccatttagatttttgagagtgacacatcgagcataccaagagccaaacatgatctcaaacaaaaggaagaaagataacctcttgccagctattatggcgatcatctgccgaaagtatgtggctgtacttctgcagagcttgtctcctatgcaacacctagatgcacaaagaagaatgagaagttaggtctcgattgactgattacaggatgactgtaaaccaaagttacatgcaggaatctagaactgaaagcaaaactcccttatacctcaagactaattggatcgctttctaagagatgacaactacacattgtaagaacatttaaagctgcctcaagctcccacgtatgcatatacctgaaccaagacataacagagcttcaaaaccaatccactacagaacaaaactgcatgtagccgtttgaaataagacaaaaaaaaaaaacaaactgttttctcagtttactaacataagcgtaaatcccactatattgtgtttacgcttatgttagtagactcagaaaacagtttttttttttcatggttgttacttgttatagaaattataagtttacatacttaagagccagtgttgctgccagctgtttgtcctttagccgcaggcaatactgccaactgttgctctggcctccatatccctgagatcgtcctgatgttgaaggattttcttctctacttttgattaggagctgaagtaaccaatcagaagccccattccgcaagaagcggtccgaaagtgctaaagcatccattagttttccttcatcaattagtctagcaaaattccaacaaacgaacacttaaattaatctcaagacaacaaaatccaatctggaagacttttcacaagctaacaaacaaatagaagatgcagacatatgagataaactgccatacctatttacagctttctcatacggtacttcattctcccaatcaaaagaaaggaaaacggtaggatcagttctacaaactccattttcaaaggatccaccatcacgagcactgccgtctgtcaatgctggttgaatgttatttttagaaaatgtttcttctgtatctgactctgagtcactatcatgttcaagaagtctcttgatcccagttctttcatcaggcttaatccgtgtgtcatcaggtttttgcttcggtgtcacaacaaattccgaaactcgatgcagattagtctgcatctgtatccatcggtttaaagtgggatacctatgaagaaaaagtaaaatatcactgaataagatggaaaagaggaaccgagttgatttcaaattgaaaggaggaaagaactctttggcttgacagtacctctcagactgatcaagagaaaattcataaaacaatctgtctgcatcaggagaacttggaaactcatcgttcaaggagctagatatgatagaatcactgccattgtacaatatgctcccaccaaagacgcaagctaaaactgctcgtactggtgaaatttttaccaaatgcctgataacatccaactgaagaggatacagagggacaccaggtgttgctgaggaacggacataacagttgggtttagcctctattgaaggagagagcactttaccctctgagtgggaacatggagtggttggaatgacgggaatacaagcccacccatgaccagaacgtgggggataaactgggggaacacatgctgatatcacttcatgaacaaaatcagcagacataacctcagcaacttttgcagctgcatctgtgctacttcgatcaaaaaccagacgcgtcaatagctgcaacatgcaccaacagtaagaggttactcaagatctgtgcctaagaagagtattttgaggcatgaccaatttgtataaaattggccgcacagtggttcattaatcaccacacagaggcagagagtattaaccctaatatcaaaatcttaagaggccactcatcgtactcactaagtttatattgtttatgaatataaattgctagagttcacagaataaaggaaagcaaaacccagtagtatatctccaaataaaagcagattaagaggataataccacaagcatgaatgacaaggaagagagtttatatgaaaaatatcctgagaacatcaaaaaaagaaacacttacgtctttaggccattcataaacaagagagaaaaagttgaaatcatgggttgtgtcagttccatctactatatcaccaatagcagcagtatagaggataaactgagatagataagtagaggttttgttgcttaatgggccaaatgacttctttcccttgtcttctgtttcatgtgaaacaggatttccatccacggctctatttgctgaaccaggactttgctttgtatattttagcccaagaccaagaactccatccttctcaacggccatgtctgatccgtcccctttgagtacgtcaacttctggtttttcatcagcgagtgctctcgctaagttatgaagcttacctattgtttgtttgaaaaacagttagaactacatgaaaggtctaaaatacataattagcaagagcagataagttaattgtatactacagcaagaacaaatagagacgtagagaaagacaaaataaataccactcaggaactgacgcttgcccctatgagcatcctcaatcatttgatgtagcattgcaagagcacgatctttttgtccctgtctatgagattccgtgcaagatgaaattatggtatctccactaaaactggcttgaagaatttgagggtcatcctgaagcatgacagttcaggagactagtaagaaaggcaaacaggaataagaaaagaaaagaaaaggatcttcacatgttgttgtgcacctaaatattcagatattttataataattgcaggatttaaaagcgtttcctctgtaatgggagaaaagagcatggtaaaatacaaaagatctctctactcacatactacttcttaaactaacgtcataacaaatttcttatatatctcatttccctttcttaaaagtcaagaaacttaaaaaacatcatctttcattaagtcaaaaaacggttaccatttgtacaaaacttcaaacaaagagaaaaatatcttatcaaactaaatgaaagttgtgcctttaatgcaacttgaatactgacctgttcaaggaattcctgcagacgctttaagatccttcgcaatacagaaattattgcaacttcgtggacctgatcccagtaagtaaaccccaccttcggagctcctccagggtaaatttccgataacataacttgagactgcgcaaaaagtaaaacctacttaggaacaacagtagtaggtatatttcttgaaccttttaacacaatggaccagcatcgcttttaataatttgatacaaagattaaccaaccactatttactaaccacagtacactgtttgggtatctatgtaaacaatgcatcaactttagaagcaatacattaatgtagaaggatatatggtaaaccagacaccctaaatgcagttcacaaaactaatatttgcagagaaagaaaacaaaatcgaagattccaaaagaaaatttagaaactggggacagagaccaagtacaaataagacacaaaaggtttaccagaaggttaccgttttagagaccaagttaaagtaaaaaggaaattaagaacactgcttgccttatccaaaagttgtttggaaattgttggagacttggcagaagaagcagccgcatctatgcacagtagaatctggcatcacaaaaaggtaactaacttaaaacttgcttagaggtgggtaagacaattgattgcaggataatcctgtcagaatctgctaaagcatttgtatggttagagacaagaattatgacgacatggacttaccatagccaatggactcaattgagaacctaaagaatgaaaatctaaatcttgcacggcagctgctccttcagcagtacgagacattacatcttctacctgaaaataggaagataatctccgttttattcaacgctgtccactaaatgactaatcctctgaaatagcataagatagagaatttagactgaacaataactaatttcaattatgtcggcaacgttctacgaacaatatacaatatgcatccctaacgatatacaacaagaacagtatacaatatacaatcctcaaggcaagagaaagaggtatctaataagaatactctaatccgattatgtgagatatagggacatataaggtgatatataatatacaagcactgtgatgtaatcgaaagataccagtgttcctttgaacgcattatcaacccattcagctaattcaagagtagctttgtcctctgctgataacgcaaaccgattaactgcctcttctccaatgtcatacttagctctttgcatacagctgcagaatgagagttaatgtcttaaaaaagtggcaagaggaagccaagtattactcagataatatcaatttgggaactctggcagagataatacgggaacaagtaacaagtaatgatatacaaaaaaaacagttgcaccttgaaataagtttaattcattaactatttcatcagcacagctagaaagaacccttgttctttagcaacatatgtaggtgataaaaactgcagatatcagctcagcttcttactataaaaaaagaaacttcaccacagacctctaacttttcagccctcttaaccatacaggttacaaatgcacactggctctagataaaatagttcaggcaacttgataatcatttaattagtaacccaaaatccccaaaaaaacaaacagattgatattttaacgtttccctacatacagagatcattctgaattttggacttcgatttggttacctaaaggtggctagcagcttttccctgatgactgaaatataaattaccaaaaattaaaagataatttaactcacagattaagcagtttttcaggggctgcccttagaatactcaaaacctcctttaaaccccactggcgttcagaaagtggcagaagatgctgcataacagataatcgccattcacaatcttcaatgaaacgcttagccatggatactctccattctaaagcctgtcttccatcagtactgtaattaccatccagctgacactcttgttcaattggatgtgatggaagattgcggcgtaaaacatcgagtagctgttttgtgaaagaaataacaatttccttttccccttctgtaccaagatcgccaggatccaaaccaggtgtgttacttttttcagaaaaacatgccgaggaggcactttgcgtagaactgagacggatatcatcaatatgtaagagtgaaataactatgttcaccatcattatctgcaaacaaaagagaactcatgttaaaaacatgtaaactgtaacgtattgcaaaaatataatgtttgatagaaataacactgcgtgatgatgtagtatgaggcacaccatatatttatcatttttattcaaagtaaatagtaacgcacttctacttttttcaatatggtgttacaaccaaattgatgagaaaagcccagattcttgtaaattaatcaatgtatatatgtatactaccttgcgtggaacatttttaatggcctccaaatggttagtgaggtcttttaaatggtaaaatactactcgatgactagcatctgtctcatccttcatagcctcttccattgcacctagtgctaaaacgattgcctccagagcataacgcatatgcatcagttcaatatcttctatcctacagtatacgaagacataaaagtgaaaccgcaacgattcacctcagaaaaataaaaatcaaaagagctttaagaatgcacaaaacatttcacaaaaacaagagggctattgcaaaaattgttgtgaggggttaggtgctaaaatctaaacacagatacatctatccaagaaagtaaagagacaactgatcaaagtatttgtatatatatattttattgaactgacctcttccaggcttctgcagttgaagcaataggttgcatactaatcagtgaaatagcatcttggaattttatgcccggaacaacgtcaaacaatacctacataattgtatgcagttaaaacttgttcggattaagagcaccaagaaaacattcggattaagagcaccaatatcacttaacctaacagaaacaattttacatgatcatactaggaaaaaatcacatgccactgctagtgcataatataccagtacctcgttgacaaagtttgtcatagcttggcaaaaactgaaagaattaacagagaggtttaaagggaagaggaaagaggcaaactcataaatagtaatttgaaatactaagtgccaaagcaaactcatctatccagtggaaagatttcaaaaaacatttagatttatatagtatgaaattgatggcaatgtcagtgtccttcacagtgacaaggttcattatttcaaaatacagtactaaaagttattatggcataatgaaaagtgctgtattattcaggaaaaaagatgtatattctttcattcctccaagagctcaggacacctagaataccagaagctatcaaaaattcattttatatgatccaaggaaacttgctaactataacaatgtgataaacgaaacagatatcttttaacccaaaaaaaatatatatatatttatccaaaattgacttaaaatcccactgtactcttattgttgattagtactcctgataaaccatagtaacatatgctacaatatcctcgtgttatctattcctcttcttatttaactatacgtattccctaggaagacaacattcctaatgtaagcaaatatatctagccaacatgatatataatgaaattttccactgacaatactaaatttaattatagcttagagaaatttatttgtacatattcttccagaacacttttcctgtgggggattagtctatgtagaaaggatgtttaagaatgtcctacccgaagtggactttgcgctgaaagcctttccaatacaagattttcaacaaaaggatccacctccgcatcatcatgcgcggatgacacattaccatgcatcaagaaagatgcctttggagtccatgatttaccagaattgacacaagcagcgaaagatgcaagttccagctgataacataacgtatcgcagaggtgttccacacaagatttctgcccagatcattgtgtcctgttagactttcactgtcatcttctaaaaataatagatccaaatagtagtttatgtgaaggaaaaaaaaagttacttcatctgtctggtttccataaagagaagattcttctagccgaagtgcttgcgagtcactagtccaaagtagccgcatcaattttctacgggttgcagttttgcccggcaatagatcccaacccatggaggctactaaagggcgaagtcggggaaacaaagtaagaacctgaaacatatgagcagaagagggattcagatcccaatagaaaaagggaagtcaaatggggtagcagccaatcaacaatactgcagtaagataatgagtacgaagatatgtaactttattctattccacctacatcattagcctcctgaagcttctctttctttacagaagacaaagcagcacacatcacacactcaagaacatgtgatccagaaatacgagcataatgatacatatctctgagacaagaattaattgccctgctcataggagaacttttgtcctctatatttctctcagttttcaagtctacaagatatcgccggaaacattcaagagggagtggaatttgttcattgtcgagagataaatgtagttggctatgtgggaggagcatatcatcttgaataccctgccgaggaaaacgttgtaatcagataacagcttatagtacaagataacttactcaaagccacacatacacatatttcaatatccacatataagcaaacccatcaactcagaccaaccactgaactcaactatcaccagtgtaaatattcacaaagtatatagaagaaaaatgccaactggctataccagcttcaaattccagtataatcaagattgacaaaacggttctaagttcttaatcgcaacaaatataagctatactacatttacatattagcaggttccgtaaaccacttgttcttttctcagttcagcaatatgtaccaaaaatagttgtatcttacatgtgaaaccttgtttttaatgagaacgatccattatatcagcttttataaaaaaattaccaacctggatcatctgaacaagatctccacaattcgatgagagagcttctttatacataaacagcaagttctggcgcaccatgtgccaggaatcaccatattcatcctttttctccataactcttgaaaggagagcttttagaacagcactatcataaataagaaaacagaataattgaagtaagttctctattcttaaatatgcaagaaacaaatgctaaggaacaggaagacaaattgaagcaggaaatagaacggaataaactcatgtatttgcggaatgtatataaatcaagcacttactgatagttctctttctctactccataatcaaggtgaagataacgaatgcgatcagctgccccgcgctcatcaccttcatccaactttgttttcatagcatccaactgtgctaactgaacattcctctgtatcaaagcaaacacattgatgttatccagctccggagaaccaatacatgtggcctcattcatctcctttctctgttcttctccctgaacttcctcaaccaaacatgtaccgtaactctcgcaacccgcaagttgcctctgaatattacaacataaagcatcgaaaacatcagagtaatccaatactatactcctcaaagacacaactgcatcttcctcaatcttattacttccttcactactactagtatcaacaacaaacttcaacctctcaacacctaactccaaaacaccttgcaacacccttaaacaattccctaatccagaattttcatcctcactctcctcatcttccttaatcctctctgtaactctatcgatcaaaacctgaaccatcaacaagaaatcggcacgcaaacttagagtttctgaatcaaatccccaaggagaagtaggattttcgaatctcagaagctcaatcgtggagaggaacgagagaagagacggggaaggacaagagcgtgaccagaggacattatcgaatcttccagcgttggagacgatggtttggagaatggtgagtgcgaggtcagggttacgaaccctgagagcgagtaacgtagccttcaatggctcgaattgagccagatgaaggtggttcgccgcgagacgggagagaatctccgtctctttatccatcgccgtcacaaattccgatcactgagctaatacataccgattaatctgaaaattatttgctctgaaattttccgtacaatctgaaatatcttggctggatttttcagatattttttgtgaagaatttttggtctggaatcgtcaacttagctgagacgagcagagcagaccattaaggctgggacagggaagcaaatgggttaacccgattgattaaattcgtttcggttctgacttgttaaccaatggttttgctttttattttattttttgtctttgctgacaaaaaaagtgtgaaaaacaattaagattttagacaaaaaaaaaaaacaaaagcaattaaggttccagtaggtttacatgtataatggcggaataatgttttcttagactatctacaatggcttattgaaaaaatttattcaatagttgaatgattacaatggggtattgaataaagaaatgaatcctatgtggattaaatagtgttgaatctattcaacaatgttgaatctttaaaaatggatccttcattgccacttgtcattaaataattggagacagaaattgtgggggagagttaaataaagataggacatgtgttgttcttttatttgctactgaaatttcttatattttattttcctctgaattattggagatcaattatcttataaaatatttatttgttttaaattatttttatactaaaattcatcattttccaaactttataaatagagacttgtttcattttatttggacacagaaaaaattacatctattttcactaaaaaaaatccattagccgataaaacataaaagaaaacatcccaacaataactcatttaacacccaaaattctattaattatccatttaaaacataaaagaaaagaaaaataatgaaaaaaaaatttgtggggtagggtgttgaattttattaaacaaaccattgtagagtataaaatttgagtgggtattgaattattatgtggaagagagaggaaatgatgtggaagaaagagaagatgatgtggaggatgttgaatcgaaaaaccattgttgatagattatgcgaatatgcaaaagttttaccaattaagaaaatatgcataatgtttaccgaaacatcaaaacacaaaataaatgagtatataattgctgaatttataatgcgattttttattttacgaatttcagtatgcgaatttttttattcttctacttttttttatgcgaattcttctacttacgttattatgtgatgttatcaatacgaacctaaactttggaggctcatttccacagtcatcttcatggagaagacgtgcatcaataggctctaatgtaagtccaagtactgaagatgatatcacttcggtaagtcccacggtactttgatgattggtgaatcatcaaagctcaaattccatcatgaataacatagatagctagaaaaaaacaaaaggttcacgatgtaaagaaataagatactctgaaatctcccaagaaaaagtagtatcactctattaaccttcgtcaagaagttttaggatcctacatttggtaattgcaggttaagaaaggggtgtggaataataatctggaacaacttttagcttttgtttttaattctctgtttctaatttatggtttgtttcgcttagatttgtctaatagttctttataaaatgttttcccttgtgtctgtttttactagctttgttgttgtaacttttctttggttggtttagtcttccgtattgtttgtaatgacattttgatcattaatataaattcatcaattgacctataataaaaatattccactacgtactcatcaatacaaaggaacaatgcaattcattattcaatcaaaggaataatgaaaaacaaaactcttaaaccaaaaggtgaaaaacaaaaccaaaatctaacaatcaaaaatgtgatagtcttcctctagtgtccattgttcaagatgcacacgttcggtctcaattgttcttcgagtatactatgcatagttgctgcataaaggcatcaaagttctactgattgcccaagacagaaaggagtgtcaagaagcctagtttggtataaaggtttcctactttattcaatagtaggccatgccttatatatacatgagatgagattaaacctaagcacttacatataaattacacaattgtagttagactatataatatttgcacatatgacttacacaattgtacttagactatagtataatatttgcacatattgtgtattatgaatcattaatgatttataaattgtaatgcttaggaagtagattaatgtgaaattaaggtccatcttattactataaagtttttcaatattttcttttaaaaaaacgaaagcaaatatagtagacaaaatgattttacagaagtagagaaacccggaaaggaagagtgactgagaagtaatgagacatactataatttatgacctcccactagaacaaataaaattaactcaatgatcctaacttttcttttcatttgtttacaatgctaagccacataatctcatcatttaaaagaaggtctaaagaaaccgaaggagaaaagaaaagtaaacttaatacaagagaaagcgtgtttctcggatccgtgtgggatcagcgaagcgacaggagaaagaccgtgaaagattctcaggctcatcgtggtcgtgccatcctggaccttgatcaaaattcaaagagtaatcacaaggctcataagccacgaccttagtggaagaagcacgagaaggcaagagcttaagcttcatcaacaaaaccttccatttgggcaagagcctttctcttcgttggtgttgcttctgttctctgcaactcttgctatatcttccaagtacaattgtctctctgtgagatgaagctgatgataacacgttaacgttccatctctttttgcttgaagattctaacatcatttcttccttctgttctgttctgtctttgttttgttggttgaatatttcgtcttgtgtctttgtgaatatcttagctgtgttatttatattttgtagtagatggatggataaggagacgtaaaactgagactaattcaaagtcagctttgaaaggcttgtgaaactgcgttagccaacttgtatgaataattaattggtgaaagggagcattttaaatgccggtatctaatctgactactgaactacaaaacaatagtcaaagtagacgttgttttgtctttaaatctgacttcgttttgctggtgacaactaaatatacaattagtgaacattacagtaattagagtaactgagtttataactttataataaaattacattggtcttataaacgttttgtattttttctgcgtcttataactatgatatgtgtagacatatatttctgcggaaaacatccaaattcctgctgaaacattacgaaattttgtgacatacattctgttgaaatttctcaaccaacttgtgacaaatttatgacaaaactttaaatctgttgaaaattccagacaaaaataaatagtcaaaatgtatgtcgcaaatttttcgatgaacaaaagatgtcaagaaagaatcgtcaactgggcttctccaagaacatatctacttgggcctataactctttaaaaggtccatctgttaacttagcccacatacgaaattgagtcttatgactcataaggtatataatatacctttgttttttgggcaaaggtatataatattaccaaattctaaaaccgatcggatatttagaattatatttcaagtaatccaaatacataacggttcccgtatcgattccaattctataaagtttcatttgtcaccactagttactatctcttctcaattggagtttgactctatagatgtagaaaacggactaccggagtttggacccagtccttgtggcccggccgacaaaaaaaaaaaaaactcactttagaatacacagacacattttccttcagtctttcattttttccgccaatcctccaatacaaaccatggcaggtggtccgaatacggacatttgcttgtctaaataaaactataaagtacagataaaaaataaaaaagtaattgtattacgtcattacgtgatctagtgtgtgtcctaattgcatcatcaatgataacatcatacgcaatcactcgtcgtcttggcatttctcataaaacaaaaattcgagacctcctctccacttcgaaatttcattttttttttctcaacagagtaaatttggctcttatgcacctgtcgtgtgaatcctgatctcgctttagattgtggaagccttcgacacatttcccattttgaatttgtcttcttcttcttcttcctttagtttttggggatatttcaccatcctcgttgaaatcagtgtgattcttcttcgtatacaatgacgaaattgagatcgaaatggttaggtttaagatctgtaaccatcttcttaatcaatttctctctagcttttgctttcgtttccgctgagagaagaggaaaatctctgaggttaagtacagacgaaacgcgggaaaatgaatcaagtttcttccttaaagctatcaattttctatgggaatctgatcaaataggttatcgtcatgtttggcctgtaagtatcattcttcttctaagtttcatctcttgtgtcagaattatatgttaatggttttttttttgtcagtcaaaagagcgaatgttgtttacatttgtgatatgacgcggaattacatgtattttgttatttgtataaacaggaatttgagtttaattggcaaattgtattgggaacacttgttggattctttggagctgcgtttggtagtgtaggtggtgttggtggtggtgggattttcgtacctatgcttagtttgattattgggtttgatcctaaatcagctacagctatttcaaaatgtaagtttttagttaacaacattatatgtttttgtcttgatgtttttttgactaatattgacatgattttcttaggtatgattatgggtgcttctgtgtccactgtgtattacaatcttagattgaggcatccaacacttgacatgcctatcattgattatgatctcgctttactgatccagcctatgcttatgcttgggattagtattggtgttgcttttaatgtgatttttccagattggttggttacagttctactcatcgtcctctttcttggtaatcggtttcgtaatatacgtcctttccaccattcgcggttaattagacgtcgaatcaccgttttgttatgaatgtatgtatgcaggcacgtcaacaaaggcgttcttgaagggttctgagacttggaacaaggagactatagagaaaaaggtaccttgataacttcttgctaaggcatcaaatggaccacctaacacctaagaggggttgttatatgatttattgctagatagtgtcaatcttaatgaaaaaccaccaaactaatttttttcttttgtgttacaggaggctgctaaacgtttagagtcaaatggtgagtttaattttttgtttgttaaacatttttcagggaccactattttacaatctctgttttttttcttttatcgggaaaacattcctcacataatctacttttttgttaggtgtatctggcacagaagtggaatacgtgcctcttcccgcagccccgagcacgaaccctggaaacaaaaagaaagaagaagtaaatgctattctctttacactagtgcttcttctgtgtttgcaagttatgtcacaactaaccatgctaatgtactgtaggtaagtattattgaaaatgtatactggaaggaactgggacttctcgtgtttgtctggattgtgttcctggcgctgcagatatccaaggttatttattggtctttatcaagcaattcacatatatattgttcatgtgcaaactttgctgatacttttcatgtcctactgtggaaacagcaaaatctggctaattgttcagtagcatattgggtcataaatctgttacaggtacgtagtcagttacattttcttgcagagagatctacgtatacggcttacaaatacttacgctttgctactgtaatttagattccggttgcagttggtgtatcaggctatgaagcagtagctttgtaccagggtagaagaatcattgcgtctaagggacaaggagactcgaatttcaccgttggtcagcttgttatgtattgtacatttggcataatagcaggcatagtcggtggtttacttggtttaggcggaggtttcatcatgggtccattgttcttggagctcggtgtcccaccacaggtgtgaatgaatttattacaacattataatttagaatcacttgttattgtacaacagttgtgtgtttttttgtgtgtaggtctcaagtgccacagccacttttgcaatgactttctcatcatccatgtctgttgtagaatactatcttctcaaacgattccctgttccatatggtgagttctgtgtcattcattctattcaataaggccacggagtccattaaagtttcacgatatcctcactatttgtttacgtttgtgcagctttgtaccttgtgggagtggcaacaattgcagcttgggttggacagcatgtagtcagaaggctaatcgcagccatcggccgcgcatctctcatcatcttcatcctcgcgtccatgatctttatcagtgcgatatcgcttggtacattatctccctctcacccaacactattttcgcagccacgggcgggttttatcacaatatgtaatgttgttatcgttgtttctttttgttcgtaggtggcgtgggaatagtgaatatgatcggcaaaatccaacggcatgagtacatgggtttcgagaacctttgcaagtacggtggctgacgttgtacttagcatgtagcttgttaagtgttaaacttataaagcttcattcttgatggcaagacttatggtcttttgattgtgtcttgtgtcattttttaaatttgaaaatcgaattgtataattactacttacttagtagtagtggtactaatttttttcttttcttttttggctgaattatggttggaaatctaatctatgtcaatataagtgattgatcaatttgttagcaactttgttcgtagatggcgtgggaaaacaactttgttcaatatagacgctttcatatgatttgcaagtaaaaaaaaaaaaacgtgggtaacggaataataattaaaactataatcatatattaacccgtgatagttgggccgggtattggatccaaaaaccggcccaataaacttcccaatccagatggagacgaacctggaaaacgcggaggtggcgaaaggggactctctctactggcgggtaaacgaaactcgagagaaatggacgacgagaggattcgagagcgagagagacttcagatcgagcagattcgtgagcttgatttcgaggaattacaagtcgaagaagtcgatgaccttcacgattccgattccgatgataataatgatgatctctcttcatttcctttctcttcccacgctcaagcttcgtgagccaatctctcctcttaacacttgccttttggtttccctctacgatcgtttgttacttattcgttctacactctcttcgtgcctatttctagtgactacgcgtggctcaatgtgttgctagaatcagtttcaagtgtttaaaccagtttgattttcgagttcttgcttagttagggtttcgtgatgtttgatagttgtaaatctgtaatcctttagataacggatccaacaaatcagtaatctctgaattggcatttggtggtgcttgacagtggtaacctcggtgatgatgaacttatgttcaacccagctttggcttctttacatatgtatcttggcggtacggatcgattctcccgtcttgtttctttccgaggtagtttcttatgtgtttaccacatttgagcttatatggttttgtaatgtttaacagaggttgaagacactcaaaacagagtttcttttgtggatggaggaacggtattgaagatcccgcttttctatcttgaaggtatttataataatatggtgtggtgacttctgtagctttagtttaagaatctagttgcttgttcactgacatgggatgctaacttgaattcaaagagcacaccatgattctttcttcggatttgcaagaagtactgtttctttaaaccaatttgtgtaagacatgtatgttaagatgagtcatatatctcctgctattgtttttgtactcaaatatgtatgtaagacattgacactggtgctttgcaatacttcaggagtggttctatttcctgaggcaacactcccccttagaatcattcagcctagtttcttggctgctgttgagagagctttgaaccaagctaacgctccttctacgataggtgtggtaggtgacttaatcttttgctttgcttgttttggattctctaaatatctggttcttttctacaataaaaaattactcatctaaaagtcatcctgttatcttcagattcgtgtttacagagaaggggctcagtttaagtatgccagtgtggggacaaccgcagaggttatatttctatattttcttatttcctttcctttcaaatgattgttagatgaagttatacctttcagttttctgtttctaaatctttgttttgctttgtctaatctaagacctctgtggttttgtatttgaaaatatctgcagttttgtatttgaaattgtgggatctgaatatctgatatgattggtggtatatcttaagaaataaatatattttacacttggcattcttgttgatcgatttcttgcctaaagtactatggactcttaaattatttgtgcaatgtttctggaggaatggctgagacaggggtcttgatgtaggaagttgggaaatgctatggttgttgttttatatttttaattggtggatttattttggatctttggatcttcttgttcttgatatgtaacatactattttcggtgataatcacagatacgacaataccgtcgacttggtgatggttcattcaatgttattactcgtggacaacaacgtttccgtttaaagcatcgctggactgacgttgaaggatttgtatggacattttctcatatatatacatagacactctgcatctttattagtagaaatggggaatgcatctttgtttactgtgacagaggcttatatcttttaaatccttcttgcagacttgcggagaggttcaaattgttgatgaagatgtgcccttgaggactcccagggacgcgtttggaaaactggtaccgctaagcaagttgcgaggtcgctatcccttgggtacagcatctttatctacacctcttagagatatggacgcacagtctgaagcaaattctgaagaaagttttgaaagtgctctttctccgtcagaaaaaagacttcattattcagtagttgactcaatattttgtaactcaacaagtagtgatgatgatcaagtagtcagcacctctacagtccaatctagtgggtctaatccatacagcttgaggtccattggatgtttagcttctagccatgacaacgaaaatgaagacgagcaatcggcaattggcaagactcctgtttcacaagagaaatatcagaagcaaaataggctggcaagtttccggcaaaatactgatctaagccgattccgtatgacgccaagagcattttggccattctgggcgtataggatgtttgactcatattatcttgctcaaagagcagtcggtaaactccttgtttattttgatcgttttctataagtagcacacatatttagcgtctgctaatgttaaaagaaaatgcagatctgtggaagcaaatagttggggttccaaacatggaggcttttgtgaataaaccagatattctatccttttccattgcgagtaaaattcccgtgtctgagtcaattagacaagagctcttggagctggatggagtctcctatagattgcagcgagaaattgaattgcttgaaagttttgatcgtgttcgatgtatacactgtcaggtattttgtgtgagcatggtaaataccatttccacttcctcttcattgaatatttggcttactgatacgtttgcatattaataatgcagactgtcatagcaagaagaaaagacatgttggttatgtctaatgaaggtcctcttggtgcctacgtaaacccacatggctatgtccacgagataatgaccttttacaaagcaaatgacatagcgcttagaggtagacctgttaaaaaggacagctggtttcctgggtaagagttttcaattaatatttgtccttaaccagttttacatttgaaacagttgacctatttccttcactgtacttatcactcatttgatacctcagtagttaagaaatatagctcagtagctattatagatcctaagggtttccaagttgtatgatttgaaaactagctttggttcaaaacaagctaattgtttagagcattagcatataaagcagctggcgcagtttgttgtaagaaaatcgtttagaccaagtgttcatagacatatgctaacttgtttagagcattggttcatgtactttattaagcagacaaatctgtgatctttcaagtctgattgatgtcttaaatctgcaggtatgcttggacaattgcaaactgtgcgacgtgcgaaacccagcttggttggcatttcacagcgacaaacaagaagttgaagccatcgtctttttgggcagttcgtggctcacaggttgcagatgacatgcgctgaaacagcattaaaaccaggtctcactcacggatcaattcgcctttcaataccaaattaccatagaaaggtttctagcttaaacttccccactatgctgaatattgcaaaatagcttgtgaaagcacaaagctgactagagtatagaattc

SEQ ID NO: 283 - DNA, 102004 bp, Arabidopsis thaliana
gaattcaacaacatcatgataaacttttcaatccacaaccaagccaaaatcaccatcatcattattattcaaaaatgaatataaaactaaattaaatcacaaccacgtagtaattaagcgatttttttcttaaaaaaaaacataattatgtagagagagaaaaaagttacatagttaacaaaagtaaaaatggaaaagcggtaaaaataaaaagtaaaaagggaaaaatatctgaatatatatataacagcaaggtttttgtccgcatatataaataatcgcgtgtgtgttcacctctcagttgttttccttcttcttccttatctccgcctctttctagggtttctctcaaatcagctcttcaaccatggcggacgaatctcaatactcatcggatacttactccaacaaacgcaaatacgaagaaccaaccgctcctcctccatcaactcgcagacctaccggcttctcttctggtccgatcccatctgcttcagttgatcccaccgcacctaccggtcttccaccttcttcttacaacagcgttcctcctccgatggatgaaatccagattgctaaacaaaaagcacaagaaatcgctgctcgtcttcttaatagcgctgatgctaaacgtcctcgtgttgacaatggtgcttcttatgattatggtgacaacaaaggatttagctcatatccctctggttcgttctttaaaatctcttttaacttcttttgtttatggaatttagggtttggaattgaaaacttactgattgtgatttgatcttgatttagagggtaagcagatgtcagggacggttccgtcttcgataccggtttcgtatggtagctttcaaggaactactaagaagattgatattccgaatatgagagttggtgttatcattggtaaaggtggagagactattaagtatcttcagcttcagtctggagctaagattcaggttactagagatatggatgcagaccctaattgtgctactaggactgttgacctaactggtacccctgatcagatctcaaaggctgaacagttgatcactgacgtccttcaagaggtagtagtcttagtctttgttgctaatgatagtgaatttaggtgattgatgtagatttactaatggtgtgtatgattattttggtttaggctgaggcaggcaatacagctggttcaggtggaggaggcggccgtaggatgggtggacaagcaggggctgatcaatttgttatgaaaattccgaataacaaggtacttaatgctctggagattgaccaatttttggtaatatgtgtcttgtatgtaatatgtaaactgttctaggttggtttgataattggtaaaggaggtgaaacaatcaaatctatgcaagctaagactggagctagaattcaggtatgtgttcttgtcaattatgtttaggttctgtttgtctccagctggtaaaatgtttattcatcccgtggttatttgtctgcaggttattcctttacatttgccccctggagacccaacgccagaacggactttgcagattgatgggataaccgaacagattgaacatgctaaacaattagttaatgaaatcatcagtggcgaggtatgtttgattgttgtgtttgtttatagattatgacaggcttctgctgtgtctatttttatacatgaatttgatattgtgttgtgattacattatttagttgtcattagctttaggtctatctagtatacgtcatactctattattcagataataggtgatgtaggttatactagtttcacttagtcaatatattagctgctaaaacctatatactcttcttatgccttcatttcctttgatatttgctccacgataattgcatctgcattggattgcattgttcttctcttccgcttatttgcaggggaaggttctttattttattttaaaccacgtgaagatattttttgtgattttcttaacttacaaaaaatattccatcttgatatatcttactttgttattgcattgtaagattatatgttgcttcttcttcctctgctcatgctcattttgttgccgctaccttcctacacgagtttcatgtttctgttactatcttattgtggcagtttttatgggcattcgcttatatctacttttcatctttttcaatatccaatttacagtgtgcttagcatgattcttcataactcccattgctaccaagaaatattctttagcatattcacttttcaaatgctattttcatagtagaaatcttgttgtctatttttggagtatatatgcagacattttcatcgcttctggtcacagccaaggtggccaatcctacattggtttgggatgcctttgtgaggctgctgactagtttcagtccaacctgctgtgatagtgtttctaaactgttttatacaatactgtttttgttacattgtgttcatcatttcttgggtcaacataacttccgttcagctagtacttctagtttcaatcatcaaggtaccaccaaaggtgggcgactgacatttgaagacctattagccgttgtgttgtgtcaataatttgctaaccgagtaactgttattattctgccttggtactttccccaatttttcttaaatccgtttttctttaccttcaccattatattctggtaatatacttccatgagtattgacattgttgaacactagactctttagttggtattaggttattttgctgcacaaccctttgagaaaataggttccatgtgtatatatatgttgcttttgtctgcaaaagcttctatagtattcgttgttttttcttgcacccatttatctcgaatagggaaagggatgggcttctgcaggagtaacccaataatttcaccaatcagtacggtatgtaggcatcaccattacccttctagaatatgatatgatcttggttgatccgatttggactgatattggtaaatagcgtatccttgtatgcatctcaatttagtctttgttatccgctttatttgtctctgcctctgtgttctatgtgtttatatgctgtgtcattgttttattttcctgttaaaaagtgacctaagctatttattctaacgatttggtttatgcagaaccgtatgagaaactcagcaatgggtggaggctatccacaacaaggtggttatcaagcccgcccaccctcaagctgggcaccacctggtggtccgccagcacaacctggttatggtggttacatgcaaccaggagcatatccaggtccacctcagtatggtcaatcaccttacggaagttaccctcaacaaacttcagctggttactatgatcagtcctctgtgccaccatcccagcagagcgcgcaaggtgagtatgattattacggtcagcaacagtctcagcaaccaagcagtggtggtagctcagccccaccaacagataccacagggtacaattactaccagcatgcttctggttatggccaagctggtcagggataccagcaagatgggtatggagcttacaatgcctcgcagcaatcgggatatggtcaagctgctgggtatgatcaacagggtggttacggcagcaccactaatccaagtcaagaggaagatgcatctcaagccgctccaccatcgtcagctcagtctggacaggctgggtatggtacaactggtcaacagccgcctgctcaaggtagtactggtcaggcagggtatggagctcctccaacttctcaggctggttacagcagccagccagcagcagcttacaattctgggtatggagcaccaccacctgcttcaaagccaccgacttatggccagagccagcagtctccaggtgctcctgggagctatggtagtcagtctgggtatgcccaaccagcagcttcagggtatggacaacctccagcgtatgggtatggtcaagcgccacagggatatgggtcttatggaggatacacacaacctgctgctggtggaggttactcttcagacgggtctgctggagccactgctggtggtggtggtggtacaccagcttcacagagtgctgctccacctgctggaccgcccaaagcatccccgaaaagttgatatgtgtatggataaatttctactgttatacaaaacatgcttccatgctcttatctttttcttgaggatttatcaatgtttgtgtttcacattttagctcttgtctgtcaactctctttatattaaagataatgttacgttttagcctgttattcttcttacaatgattcaaattcaccaaaattttaaatccgaaaattataatttgctaaacccaaaaaaattatttcaaaatttttgttttgccaatgtctttcagctattctgtatcggttaactctttcagcaataaggattccgacacgactgatgtgattaggcgtaagccaacattaattaataataaaagctctgaaagatatcatgtgggtgtgttggacaaatcgcttttctctcttcagtgatttcacagatctgttccgacatcaatggcttttttagcgttgattggtcggctctactccgaaatcgtctgactttcacagcagcgatgttcggctcttacgtcccgttttaatcgggctctcgttcggcacctccagctttttcagtgaagatgaccgactcttttcccgacagcatacggctccatcagcggtgttggtcggattttagttttactttggccatagatgagttactctcaccttttggtctttgttttcccttcaataatttcagcaattatgtgttggtgataacgatttaggtgctatgttgcttaaactgttgattatccgactcatgttgtttgaagcttggttttacaggaattattattaatatttgcagtttataattgaagagaagaagaagatttcgaagcatattacacaattcctttagctgctatatttcagtttggagtttcgattgtcctatttctggtgaaaactcaaagattcatgtttcgatttttgtatcgacggtgactctttcaccagaatcgagctcgtacggcggaggctgaatcggaatcctttaggttactcatccccacgtgtctgatttgtatttcattactgacacgttgcgtttggatggagacaagatgccaactcttcttcaatataatgtgatcttgggctttacttaatcttgtaaaatttaagtgtgggctgtggtttgttttagcccatttatgtatggtttgttctttcaataaaatatgagacaaaaaaaaaagatatcatgtgggtttaagcatagaaacgtttccacaaacaagtctgtcactttattggatacatatatttttgttaatataggctaaggagaaaagaggagtatgtgagaaggctaaggagaagatgatgtcttcattcaacttgtgaaaaaccaccaccagtctcggcttttgtcctaccaaacaaacagagtttgtaactgaaggatattcacatacgaaagaaagagtaatttggttgagattcaggtttacttgtgatctgaaggatttggtctaatctcatatacgattgtcgcaacaacatctcttttcaactgttaagatcatcaagggtaagacttaaccaactaaccatacaatataataaatatacagcatttgtatgcaaacttacctgggttgcttcacctttgaacccgatataacgtatttgggttgtgtcacctccaaaactctcagggaaatgcagggtgatgtttccaacactctggaactttgaatacctaatcacattccccactttcaatgtatcagacatctaacttttgaccagttgaatcaaagtcatatatagttcagtgaaggataatgctcgattcatacagactacttaagattcattacataaagtctgcagagtctattaaattcagtaaatgatatgtgtgtagcgaaaatacctggtctggtattctaagactccttgcaaattttcagctaactcccattccttcaaaagaactcacaattgtttctgcattagtgcaattgtctttggcatttaataagtaagtaaaaataatcacaacggaatacctgaacggcttgcatactctcagcatcggagaagtcaatcccttcacgattgataaacctagttttgagacaaaaaaaagcagctttctgtctttctctaatgaaggaaccatatgcagaattcacacatgtatacaggaaaagttctgtaaggtagtttagacatacactctcaacttagaaggacttgttccttcagggccaccaacaattgatatgctcttgatcttgacgtctgatgtaaatctacaataatgggacatccaaaaagtagtaaacaatttaatagtaagaaaacatggactgtatctagttctcccaagcttctttcaagtcaatgatctgaaatacactatattcatatatccaaaccaataatattagaagaaaattgaagtaactggtcggtaattaagcaaataacagacatacggtacaaaaacaagcaattcagggtctccctcattgctctccaaatgctcctgtaggcaagaaaaaaaaaaagaaaaaaactatttacttagacattatcatgcacatagctatatataatttcactgcgtataaacatagtatttgagtaaggatagatataataaaggatcattcagcagccaagcataatattggttatgtaaaacataaagttaccccagaagagtgtaatcgctgttcccacgctttgaagactgattttgcacttcccgaaacagattcattcagagctgaaacctgaaaccaagtaatattactagttaaaaaacttctcttgctttaagcatactaaaaccagacactgattcacacagagtaacctaaattcttctgaaaaccccaaaattaagaactcataaggactagattatcacatttctgaatcaacgtatatcaattagaatctaaattgtttggattcactaaactagtaacatattagacgtggtgattgaagatttagacattatttgagcaaaacaaacgaaataggtaagtgattatagaaaagagagagagagagaccttggagagatcaatgtgtttgtagagagaccaatcggaagaacactcatgatcttcgcagttgtgatcatgcgtacacgacatttttcccaattctcgtcggctaaacacaaaatctggatttttcgccaagaaatttcgagaaacttaaaagcgagcagtggaagaagaaggtgggcatcaaactatcacaaggccgacaaaaagatattccaactacacgacgacgtattagtttttggaaacgcagcgttttttgtgttggtgtttctgataagcaatcataaaaatcaatcccacgcagcgttttgttcataattaatcttcttctttttttctctcaatgaaatgttgattctgattagtacattattaacttagaaaaatcattctacacatatcctaaatttaacatgcatcgttataacatctttacaactgttgatcaagttcttctcataatcttcaaatcaaacccacattcgaaaatatgaatatttgctagcttttccaaacaaaaagtatgttgaatttcacatttttgggttagttcgacatattttagaatatactataacataatctatgttatcttctatcatgcattgaacgatctctactctttttcttttttttcttttttagcacaaacaaactgaattttattaagattaaaagtcaaacataagtttcttctccttatccaccaatggtagtaaccatagacggttacaagcggaaactatcaaagcaataagattcacacatattttcaaggctggccatgagtacaagcgagccaaattcatatatttgcaagcgtaaatacaataattatctccaaagctttatcagcagaattagtcattcacttactcaaagtgttaaagggctgagagcgcgaacccttcttccttcatatcacttatctttaagcttttttttgtttttgttttatagggccaaatctttttctacgtgtagcctaatcggtcgatatgcatattccctaacttcccattaaactaaaggccaactatctcacttgtgtagcctaccctcggccaaagtgtagaatctttcaccgtctggataagtgttttagaatcactatagaaaatgacttccccaaaatttgaattcccaaatcccaacacaagacataactcaaaaagtttatttttagttctttatattcaaatttaccacaatacaaaaatcatttctacaagactcattccggcaaaagaaaatatttcaaaacaaatttaactttcaaatgattaatgtacatggcaagttacattaccaatctctattgtggaaatcaaaattaatttggaattgataagtttcgaaactaactcatttttcagctaataaacaaagatacacgtaactataacgatttagggaaaatgatcattgagtgaacgaatttagtctgattgctttacagtgacatttacgttacactacactaaaaggcaaaacatatgcatgattaatgcccaaaagcccaaactagtgtcctttttctttaactttttccacaatgaaacgaaacaacattcattttccttcttttaaagaggaatgatcttatgtttccccagccgtgaattgcctagcaatcaatcatatttcaaagtttaaagattaagtgaatttgccaaatgccaaggacgaaaatttatttaggtaaatgacaagtgttttaggtttttattagaaacaaacaaaaatatattgttcaaaattaagatagtaatatcacacgttattttatcaaaaatatttttgtaaaattttaaaataattgcattcaattcaagcacaaaacactttgttcatattcgaaattatttaatcaattttcaccgtattttcgctttgaaagtcagaaaatcttcgtaaccttcctctctcattcttttatgttcttgacacgagtttgtctttttccaaagttttttcattgaaatatatattttttttaaaaatcagaaaagaatcatggaagtaaacttgtagagccatcatacgactaaattgagattttctgaaatgagatataaaagatcactgtctagctgcacttgaaagagatagagataatagaaatgtttgtcttgcttggactattgtagaaatagatttggagttttcatttggaaaaaatattgatttcctctcgataatcctcaaaacaaactcgtattggacatactaacagatgataaccaatgttatatgttttcttaatgactaacaacgatatgtctattttagcttagtcaacggattctcgtgtttcaaatggtagtcaacgttttcatgttttgaataaccttgatgttcaaaatggtcacaatttgaaagttgactagcagaatcgtaaatgagtgttagagattgcattaacaactgataacatcatgtctattttgatctggtcaacgaatttttatattttaaaaattactcaatgttaattcacgatttaaaagaccacatataaaattaatgaataaattacaactttttaaaaattaggaaaattaaatgacaaagccaatacttttggcttttaactaaaacagaatatctataattaaaaaaaaaaaatgtacattttactagcgtgtatagataaaacaagtaatggccaagcgttacgttggcataagaatgattcattgaatattaaaatttataaatagcagaccccgcctcgtcttctctccgaagattcttatccacgtcacaccttcttcgcctgagaataccacctaacaatgaccaccgtcgtttcctttctcgccctcttcctctttctagtcgccgccgtttctggtgacgtcatcaaacttccttctctagcttctaagttcttccgcccaactgaaaacgacgatgattctactaagtgggctgttctcgtcgccggatccagcggatactggaattatcgtcatcaggtatcgataagattttctcttgatcatatcaaaaaatgttgcggttttcgggttttgaaaatttacagctcatgcaagttttgttttaagtcaatctaatttagttttgtcaatattagttacaattcttgctatagtccaatcttagtttcgttccatgttgtgagtgtttttttagacaatgaagcttttcgtgaaccggtcggatgataacatcgtatttttactatcatttcaatagtttggtagagactaatgtgtttgtaaataatttacttttgtcactttgtgctgtgtgtttttatgaaacagtgaagtttttgtgagcctaagttagagtgtgggctgataatatcgtatttttactatcattttaatagtttggtagagactaatgagttataatattgttcaggcggatgtttgtcatgcttatcagcttttgaagaaaggtggagtgaaagaggagaatattgtggtgtttatgtatgatgacattgcgaagaacgaggagaatccaagacctggagttattatcaatagtcctaatggagaggatgtctataatggagttcccaaggttattttttccgctttctttcgagttttagctgcggtttacggactattgaaacggagttgtgatatggttgtggcaggattacactggagatgaagttaatgttgataacttattagctgtgattcttggaaacaaaacggctcttaaaggaggaagtgggaaagttgtagatagcggtccaaacgatcatatctttatatactatagtgatcacggtggtccgggagtgctcggtgagtgatctcctctattttgttgaagttttcatatatttttttactaaagttttgatgatttgaatctccatgtttattttcagggatgccaacttctccaaacctatatgcaaatgatctcaatgatgtcttgaagaaaaaatatgcttcaggaacatataagagcttggtacaatgctcttttgaaaatgctttctttgtcagctacatgtgattttgcttgaccatttttagtgaatgcaggtgttttatttggaggcttgtgaatctggaagtatttttgaaggtcttttaccagagggtttaaatatttacgcgacaactgcatcgaatgcagaagaaagtagctggggtacttactgtcctggagaggatcctagtcctccttctgagtatgagacctgtttgggtgacttatacagtgttgcttggatagaagatagtgaaaaacacaatttacaaacagagactttgcacgagcaatatgaattggtaagcttcaagtgttgtatatataccattccaagttttgctctggaactttcgaactgttcgttcattgagattgttgtgtgagcatgcatcaaaatgatttgattgtttcaggtgaaaaagagaactgcaggttctggtaagtcttatggttctcatgttatggaatttggagatataggactcagcaaggagaagcttgtcctttttatgggtacaaatccagcagatgaaaacttcacctttgtgaatgagaattcaataaggccgccttcaagagttacaaaccagcgtgatgcggatcttgtccatttctggcataaggtttatcttactttctttgcttcctggtgaaatctaaggactaattttgatattgcttctggttacttaatctgtcaagttgttgttacacgtagtatcaaaaggcaccggaagggtcagcaagaaaagttgaagctcagaagcaagtccttgaagcaatgtctcacagacttcatgttgataatagcattctgttgattgggattcttttgtttggtttggaaggtcatgcggtgttaaataaagtccggccttctggagaaccgcttgttgacgattgggactgccttaaatctctggtaaccttttgcatcttcttgaaacttggctatttaaaattgttgcatcaaggtttggatcaactctatatggtttgtattaaacaatggtattggccagaggatgcaagactcaggacgttagatacgatatgatatgtcggaaaaaaatcactttcagtcctcattagatgattaagcttcttgtgatgatcactttcttattctcctttatgtggttgttaggtgagagctttcgagaggcactgtggatcgttgtctcagtacggaataaagcacatgaggtcgattgcaaacatgtgcaacgcagggattcagatgaggcaaatggaggaggcagcaatgcaggcttgtcccaccatccctaccagtccttggagctctcttgaccgtggattcagtgcttgatcttcgtctccgccctatattaatcgatgtccattaatatcttactaccaattatactccttcctatgtagacaagatgttgtaaatatgggatgcttaagttcttgatgtcacagacaaaagaaacagtgattgtaagtagttgtttcaaataatctttgttgttcaagtgatttcaaggctttaagacaaattaacacatataaatgaggcttacaccataatacgtttacatggtacatatattgaggataacatctatcacaatttttctaattttgtaaaatacatatcaagtacaatacgcatagagaggattaaggcttagaggagtcatagcgtttacgttcttcttgtattgactggaaaattctggcagcattctcactcgcgagctttgcgttgtgaggtaccacctttatcactctcgtcactcctcccccatctcttgttgtctgagtaacagttgttcttgtcgtcgttgtggttgttgtcatcgtttgctcaggtgcattgttgatgttgctgtcctcatcaacggctgcgaatggccgaaaggacttgctaccagagattccctgtggcccacttggactgcttcctgtgctcccttgcctgctctttcttgctcgcggataagactttgttggctgttgctgttgctgtggagcaggttcattatcagatctctgttgttgttgttgggtgttctgaagatttccaggatgtccaaactggttcatttgctcattgggttgttgttgttgttgttgttggcttgaacaatatgggttcattatggtgggcatcattccatatggagggaagtagccattaccaggaggtgggaatcccatgccggggtgatattgaggcattaccattggtgtaggcatataatgaccataatatcctccataatgccccgtgtgtgccatacctgggtgaggcttgtatatcagtccttccgagggagacattacagggatcaaccattgctgatgatttcctgaaggaggaggctgaggaggaaagcaatatccatttggagccggtgaagccggtgggttgtttgcaaaaggcatgtagttggattgttgatgatgaccttgatttgacaacctcccaactacgttctcagctgagctttccattttatgttggtcagtcttctccgagtcacccctttgtttgacgacaacatgtggtagaggaggctttaccagaaattctgatggaaggagcttcttcactggatagcttttagcagaaacttttccaagaaaactgatctcatcgagcaagagatccggtgatgcagcaataagtttttgaacctgattattacacagttgaagaggtttgtttcagctcgagaagaaacaaatactcatggaaacatatgagaagtttctgaatgactttaccttaatcagtctgtgcaactcaaatagttgaacagcaaatactctttgttgactgtaatgagaaacagagtcacattaagaagattatccatcaaaagttcaacaaagagagacatagtttaggttgaacagctaatggaacaatacgatcgaaatgagataggaaaaaagaaacaagaatacatagccaatcaaaaaagatagaagaaaaccaaatcaatgggtccaatgacatattaaagcatagataacaatgcaaaggacgggcttattgaaatctagcttacagcgcagcttatcctctgcaaaatgagatgtcagatatttaacaagaagcaagaaataaaaatcttattatttgcattggtcgtgaatccgataccttaccatatggattagagtacattgaaccttaaaagttaagtcatgaagcctacaatcataaaaactctgtagttcacaaccacactaaggatcctcttaagcagtagtaagaagaaactataattctgcatcgtcataagactcaaaactaactttacgtatggttaactaaaatttagatcctggggtcctcggaaaaacatttccctacctggttcaaccccttgaatgacaagtagggaaaatgcccaagacgacagtgcagaataaaagcaataccaaaccgagacagggacatgttccaacaaccagatgcaaagaaggtatagtaataaagccatcggcgggcaccttgcacaatataggtcaacagagaatgtccctccctgctataacatgatccaacgtgttaaacgcgttaatattctaccgaggactctacaactaaacacataataggaccattttagatgaatcaggggcctctcaactatagaaccatcacttctcaagcataaacctgaaatctctttctcccaaaatgagacagaatatgaaactgagttatagtcatatatgtatatcagcaatcaattgcagcattaatcatgaaaaaaaatatgaaggagagtgttctagaaatttgaaatttggtgatagtgaaatatgccctaccacagtcctcaatgaaaatagcaaaaaacaacagaggaaaaagcttcagtaagactacggaacaatgcttaaatattaacttctttcaagcaaaaaatgttggtatcaaagaaggagataaatagaaagagcggagaataaataaccaaactgtaaatttctagtgaacttacttggcaatggctttccttgctctccagaaacgtttttgacctaatatacccacaacatcatcgggagagacatctatgctggatatagaatccaccatcgaatcatcagaaacgtcatcacttgcctcttcatttatctgctgcagagaggcgcatgctctgcttttgctgtattcacgatcattatcaatgtcttcaggactgccatgaccctcttgtgaatgattttccgttgccaagtgagattcagctccattatcagtgtccttcagacgagttttgccaccatctcggtataaccgatttctagactcttgtctcaaggaagcattataatcatttactctatcatgacttgatgctgatttttcgagatcaatctcctctgtgactgatacatctaaagagattacaaagccacctgaccttgcattcgccttgacctgatccctaacttcaggttttgaacaagtagccaaacatacgttttgctttgagcctgtctgattcacttcttgaaatcgaatggagtgatgagagctaggtgccaccattggggtgtgtttttccttctcaataccactcttggttctgccatgagactgagatcttcttgagttaatatatactggaactgcaaaatcttcttcctctctcaccattttcctctgatcatgctgtgccgaagatctcacattttccatgaaggacatttgggagacaaacttctcagttgcttggtttgcggctgaagaatcaagatgctggacagataagtttctttccacaccacaaggctgcattgaagagggtaaaaaaggattatttctcatgtccttgcaatagtctgaatgctcagggcaatcacaagaaactttcatcgaacttcagaacataaaaagaatcaggcacaacaagaatgttagttttaagaaataaaccacacttagataaacttgtgtctacaagactctcatatatacaggagaattcaatcctaaaagctcaatccataagcaaaaagaagatactatgatctgataacaattgaaacatagatcaaccaatgtcctactttctctttcaggctatataacatccaaactcatacaactaataacatcaagagcctatacaatgatcaaaatcaaaacaatacctgactagatggtccaggatgaaccaaagtgcttgtgttgttactacgagaattcatcgttccatgatcaccaaacctctgagaaggaatactaagctgctcataaagagccatcttgtttctaggaggagctctaggccctcctttatctgcatcattcacatgaagccgaggaaacataggttccaatatcttctcctcatctttccctctcttcatcactcacaattcacaacctttttcacttgcaaacttctcaaaccccaaataacctaacttcacaccaaaaatcttccctttctcttaataattcaacctaaaaactgagaaagactccaactttcacaacaataagcttcaataaaacaaacccaccaatcaaatgaaatatcttaacccaaaggacaaactacgatagagatctcaccaccaaaccaatcagagaaaacgaaatcgaaaaacagactaaagaggaatcaaacaaaaccaaagtgagttttcaacgtactaatcgagaaacagagtgggtgaatcaagtagagagagcaaaaaggaacaagattcagaggaaggaagaagatgacttgtgaacagagagaggaaaggggcaaaaagagataggaaaagtggagcccaaaaagatagaaggagaggatctctctggagatattatagatttaatccatttggacatttttttcaccaccggaaaagtgcgtgacgacgtggactctttttgtcgttgtaataagaaactagaaagtaaaaaaaaaaaacatcatccaatacatcactttttgttttcttttaggatacgtaaaatgtcatagatatattaccatgttagaggttctttgatcagtgctttgtaatgttgaataaaagattgttttcagctaaatgaagtctgtttgttttttcttttctagcaaatgagtggagtcatcgacacgattagattacttgaagattcttttctagggttgtatgaaattataggggaatataatgtaatatatgtggatgtgaagagtaattatataatcatgcaatcttccaactcactgaatgaggagagctccgatctgttagggatttccagaattgaaaacaagaatatggaagttgaagatcatgcataaactgaaacaatttctttggtgaaacacagagccggtccaacgtttttaatgccgacgtaaattaaaaaaaacatgtatttctcatttttcatgaatttcgtaaaatcgtttctgaattttatacaatcttttctgaatttcttagatatctttggatcgacaaagtccgatccatagtcaatccctactatgcgggataacgcgatttagtgggatcgaactccagtagggtgggtaggtggagtcaaatagacacgccctatgttttgttaagttgaaatccaaaaatatgagtgaaagaaaatccaaataatatttatcttaaaaaagcctaaaatatagtttatgtttaaaaaaggaaacttaaaagataatttgtcttaaaaatgcttccaaaattttgatgcccaactccattcatttccttgcttggaatgtgggctaggcggcccaggcctagagaaacatagcaaaagctctaggagctgtgatacgttattggaaatgtcccacttggacactcttatttactaaaacacgtttcaaatccataggactaataattgacaatatataccaacggtgatatgctgcagctgaagacatcaaccccacatttttcacttgtcctgtatctaacgttgatattgtcccaattaccttgtctccctttgttaactccatcaacagtttgtgagaaagaatattaagaggtttttggacatgtatcaattacaaaacctttaggatcatcaaaagttacttccgtttttagatacttttatatattgcttattcggaagtaaagaaacaatcatatttaccaaaaccaacaagtgaatgtatccttcaaaagatagaagtcccaagttgtgatgctaaggaatggattggggcctttgttatgtataaaataaatttgcaggggttccaaaatccaccaactcaaactatcatggacttgtcctgtatggtgtcgtaaaatgcaactacgatccatcttacgaataattctaagcatgttatataattgggagtggtcggatagtgagaaatcatttcggagttcaaaatactcggtggcactatgaatatatagcactaatacctctggaagcttaaggtaaggaattaccaatggtactcaaaatagtttggtcatacggttatactcgctttcactctaaaggagattgcgaatttttggtaaagattatcaaatatcaatggatattgatgttggaaatatgtagagatatccagtggtggagccaggaattttatttataagggtcatgaaatatataacctaaaatgtttcatctttcaaaataaaaaattctcccatttatcctttttgtttagtgtatcatcaagtactttttatcaccaatacactttttgttaatatataatatatattgtggagattgattagttgttgtgtttatattcatggcttttagaaaaaaattattttagtaactattttgaaaagaatgtagaaattaaaataggatatgtctaaaaagaataaaatattgatttgtaaatgaatattacaggtttttttaatagtaaaacgatattgtagattttaagccaaacaaaaatgcaaaaaggtaagattaaatgacaaaatgaatatacatgggtaatatatcacataacatggtggacattgtgaatactttaacccaaaacatatatcttaggagacttaccttataattaaaaaaattataaagtcactaaaagtttggcgttattcaatttttttttaaaaaaaactatgattgttaatgaattaaaatattgtgttattgtttaataattttctacacttttgttcacaaaataaagtaaaaaaatatcatcaaaatagagagattgtttgaaaaactttacaagactgtgaaaaactaattaacaagatcataaaaaaactccctagcaatagtttaaaatcttaatttactttttatgatattattaaaatcatcaaaattccttttaaattagcaaccaataacaccctcctcacctaggaaaaaaacgaaaagtaaaaaccacatatttatcttcacgggaatttataaatccatattattggaaaaggaagaatggttttaagagaaaaatatatattttcgtgatacatagcgtaacatatgagccatttgatgactccaaaaatgaccaatcaaccgagaaccatttgataatattaatggtgaaacacacgacccatcaacaaaccctcctccaatggtcacaccaccacaaaccattagatcctttaatgactccaacaacaactcttatgtttggggattttttttatagacagtcagaccgaaaacacatcaataacacttaattttttaatatcatattatacaatttagtaattcgtgtaattattttctaatttaaaataattaaatattaaatgtccaaataaaaatggatcgtggtttttattgggtttttacctgtaagggctctcgttttatcaaaaaagaaaaaaaaactcaggaagaatctagttgcggttatcttcagcccaaagagtaaagacccatccatccgttgctgaatctgctgctttgatcgaaaatgacgtcgtcctctccaacacagcgtactcacgtctcaattcctcctgaaccaggtccctttattcttcttcaatccctcaatttcctgattcttaactcagactttgataattcgttacttatcgctgttttcattttaccctaagcgatttgctctatcccttcaaattcccccgaagaattttgtgttattacgcctttgaatcaatcaattaaattattaagcaattaaatgcttaatttaacttcatttctgatccaaatgtctgtttagttatcaaatatttgttattaatgcatcatatttcttcagattagtgatttgaaatgtcttatggaactgtagaatgcatgagttttgattagatcatttgcagtatctctcttttgcaatttggattgtgtactaaactatcaattgttagttagtttacatttgtgttatgcaagtactgtagtagatattgtcatgaatctattgtctcatgtcttgagttgaattcttcaggaggaaagtcactaacacaagaagctaatgagccaccagttccgatatcagtttcctcgccgtgcgggaaacgaaccagagatcccgaagacgaggtctatctcgataaccttcgctctcagaaacgttatcttagcgaggtttgtttttactactcttaatatttccctaattctgctcgtttttcggtgtttaaatgtcctgagatcacgccatcatcttctgcgtagataatggcttgtagtttaaacggactaacagtaggagactcacttcctgtcaacatgttagagtctccagcacggtctgagagctttctttatcacaggtttgttgttgcatatggttgtgaagcatttgttgttgcatatggttgtcaagtttcaaaatgactatctgatgagctttattcatgtgtcgtacttaacacagggatgatttatcattacaatactctcccatgtcagaagactcggacgaagcgagattctgtgaggacccaacagcaacagcaagcactagctcatcgcaacccgagagccgcccaactagtccagtttcaccataccgataccaaagacctcttacttcaacaaactcaccacaaccgtcaccaacaatcttacaccattcacatacatgtcctgcctccatgatctccaatgcagcaactactactacaccacagtctcgccaaagaggatcagacacagaaggaaggtttccatcatcgcccagtgatatctgccattcgggtgacttgaggagaaccgctctactcaggtcggttcaaatgagaacacaaccatgtggttatagttcaagttcgggaccaagcaatattgacggtgaagagaggatgtgttctaagtctatggaagaagatagaggctataacaaaggggaagatatcccttacgctgaagtctctagtaagagcaagtcttgtaaagcattggacatgagactttgtgaaaagtgatgaaagaggctctatgaagctgacatggcaatcctccttttaacagtgttaaaaaataaaaatccaaatatattaatatccgtttttattttctttagttataattttttttttaaaaagttgtgaggtatgttaaaaaaaaaaatttaattaaagaacataaagttatttggattaaagagaagatcaaataggaaatttgtgacgtatgtttgagaacaaaaatgaatatgaaaaaatagaaagtctgcattttattacatgatattaaatttgtgttttttttttaattttagtacaatttaagtttgtaaaaaaaaaataaaggtcaaatggacccatagagtgagggggagcaaaacatagcttataactactttaacaatcaacgaaattttttttttctccgagaaactaaattaaaattataaaaaatgataattatttaaaataatgataaatgatgcatcgttatgaaagaaatttaccaattaaatgtttttttgtatataccttataaatataactaaattttttatgtacataatgtcatgagtattatttaattactaaaagaaaattgtaaagtagtttaataacaatgtcatgtgaattatttatttaaggaaaattagaaaataagtataagaaaacatgctaaagagagatgtaaaaatatgcaaatgaacactatttgaaattcctaaagcaaaacaatgtatttaaattaaaataatagtataaaataatatttgtgtggttgatataaaaaatttataataataatattataaaagaacgtggaaaatatgtataatttataggcaatgtgcttatgtcaaatatatattggaacctttgaaattttaaaattattataaatttttgagatatatatattgattaagaatgactaaaatcctaatacaacccaatccaaatatgaggataactttataaaaaacggtctatttccacacgagaactatcacatcatactagatagagcccattctttaactctggtctatatatccatgaaatcaaagttgtcttcttatttccctctgaattgaaagttctatagcttaatgtccctaaatctgggttatatcggtttgtgctttaaacccaaagtaaaccgaatatataaaccattaagtttgattctaaaccggtatcatcttcttcttcacccgattcttcaaacaatcaacaacaattgtgataaatttgatatcaaaattacaaaagctcattggagcttcttcactcgtcttcttcttcaacaacctccgtatctccgatggcgtcttcgccccacacaaacgacggcggtctcaacaaacgtaagaatatcttaaacaagatcagatcgttgatgaaacttatgtcatgggaaagaaaaatgagcttagcaatgattctagaagaatcgaatttttgattgcaggtcgagatggtggtaatgggatatgctctggttttttttattcgattgaatttgttcttgattgttttaaaagtatggctaatgattttgattttgtaaagacaaacaaaaacacatccctttaagaattgtttcgattgaattcggattattgattttgtttctatagctattgagaatctaaaagctctcagtgtttctgagatttgattaagaaatctgaatcataatcgagttatggttatgattatgaagtacaatttttcaattgtttataatcattttctacgtgatatgacgatggaacacatccgcaatgatatttgctgctcgcaagatctaaagctttgtttcttaattacaatctacaagaatgtttaaggggatgtatttttttgtttgtatttatagattttaagaaactcgtgcgttttattcttggtcaaattaataagtcaatgggtaaaattgggttcattccggttacaattaggtttagttggtttgtttatcggttttgtatatagtaaaccgattaaatctagcttcgtggggttttagctctcgaacatttagtacgggggcattaagctataaaactttctattcgaggggaaacaggaataaaactttgattttatagagatatagaccggaatcaaagaatgggctctatctggtatgatgtaatacttctcatggagaaatagaccgttttccggataaacacactaaaacaatagttacattggagacgaccaaatttaagaaggaaatgagctactttcattttttttactaactaaaaaaagttttacaaaaaagtttcttaaaaagcccaatcccaagcccaaataccatctcttttttttttttactaaacccgattccgtgggaacgaacccatccgttggtgaatctggacagtcccctcaaataaaagttgtgagagctgtttcgtcgctttgatcgaaatggcgtcgtcttctccaactcagctagctcacgtcccgattcctccagaaccaggtcccttcttctctttctgtttgcttctctatccctcaatttgctttgtgatcgtttcaccaagcttcgctactagttattatcttccttcattccattgcgatcgcttagcttcgctgtttttgatgttaccatattcgatctactaaaatccctcagattatccaatataattgtgtagtttccgcttttaatcaatttgattgaggataaaccgattagatgttcacgtcacttcgtttctgatcgaaaatgtgggtttagccatctattttcgctcgattcttgtggcgtatacatgcttaagttcttcgtgtatgagtttggatttgatcagttacaaaatctctgtttgcagctattagtgtatactaaaaagcgatttttcgtttgatttctggaatagcaaagattaagcgaaatgttgattgttagtttcattttcagcaatatgtttgtatttggtgtatgcaagtagtgggatattgtcatgaatctcttgtctcatgtttgagtttttcgcttcaggaggaaggtcgccgacacaagaagctaatgagccaccagttccgatttacattgtgacggatccgtttcaacttcctgctgatttcctaaacccttctcctgaaaagaaattggttatcggttttgactgtgagggtgttgacctctgccgacatgggaaactttgtatcatgcaggtgtgacctttttttgtatgatttattgtttacctctattggtcgtttataattcttactggagatcttgtcttggcttggcagattgcattctctaatgcaatatacttggttgatgtcatcgaaggtggagaggtgattatgaaagcgtgtaagcctgcactcgagtctaattacatcacgaaagttattcacgattgcaagcgtgacagtgaggtgtctgaactttttgttgacttgttattatagctcatgacatatttatagtttatgacaacatggataattttttttgtactacaggctctatacttccagtttgggataagattgcacaatgttgtggacactcaggtatattttctatgtgacacggaaaaatcccttgccttaagctatttactgcctaagaattggtcctgattttttatactattttctggattacagattgcttattctctgattgaagaacaagaagggcggaggagacctctagatgattacatatcgtttgtttcactccttgctgatccacgttactgcggtacattttagattatcatgttagtttttatttatgatttatcttaatatttaatcctcgcggcatcttgttctgggcatgaatatactgatttcagctgagcaaatgtttatgcaagttcaaccttatctgtagagcctgctttttggaacttcttgttctggttcatatcttgcaccttgaaatagtgatattgacactttgcctatcatgtggtagtgaatcaatcactttacttttgtttattctgtttaggtatatcctatgaagagaaagaagaagttcgagttctcatgcgccaggttcgttacatttttactaaatctttgctagagtttaatttgaaattattcgtccagaatggttaatgagtttttttttgtgtgttcccttaatctttcaaatttaggacccaaagttttggacatacaggcctatgactgagctcatgatccgcgcagctgctgatgatgtccgcttccttctgtatctctatcacaaaatgatgggaaagctaaatcagcggtcactatggcatcttgcagttcgtggtgctttgtactgtcggtgtctctgctgcatgaatgatgctgattttgctgattggccaaccgttcctccaattccaggtttgtgcttacattaaaaatgtagttcatgacagaatgaggttactctcagcagtggtgaagatatataaaattatttccttcattcttttataatctgtgtgatcacacagttttcctcgttaaggtcgtatatgctgtagagacaaagaaaaaaagacgggtgacattagcttcgattgggttactgattgtagttggacttttaaatgtggcagataacctgaagtcagaagatcaatgtcttgaagaagagatcctgtcagtgcttgatgttccaccaggaaagatgggacgtgtgattggaaggaaaggagcatcgatcctcgccattaaggaagcttgcaagtatgaaccatttcgttctagttacagtagtgcaagcaagacatttcatatctgactgtcatataacacgagtgattttttttgtctagcagcgcggaaattctaattggaggggcaaagggtccacctgataaggttagtcttattccataggggtacacaatctgaacacaattccattatttagctttgaatgagagattggtggaaccgaaagatgtaaataaggtagtgtttatgtggaaacgggttttggtgcagatatttgtgattggaccggtgagagaagtgcgtaaggcggaggctatactgagaggaagaatgatagactattgaaggaaatgagggtcctttgtaatctgtctcattgcccctataaaaaaaaatactaaaaccctcttaaaacttggaaactccatggttcagtacggacccgagagagtcgtcccctcttcaataaaagttacatcattaacttccgtttatactgtggaacttaccattccatttcccgcaagggacttcatagtttgatgaaacaaaaagaccatatcaagtatggtttattggcaaatgcaagagtagtttatctgattgaccgttaagattgattttatttactttgcgactcaaattgagagtctgaaacccaacggtcttatattttggtatagtaacattcaagcctcaattggtttgtaaacctgttctgtttccttttgtgttagtgaaactgatagttcaaagttctaattacgttttataggggttgataatgattcgtacgtaactctacattaggttttcatacgagttagttcagatttgtgtggtctaaatacatattagccttgggcagaagaacctggaccgaagacacgacctatacctggcccaaaaattagaaaccaaacccgaactggaattggcaaagtaccagaaccgaccaacacctcaagacatgaaaacctgaattcgaatggacccgacccaaaaactgaacgggtacgcacgtcgaaattaatttcagccccatattgagaaatttaagagcactgcacaaccaatcactcccatcattttcccgccaaaaccatagttcacgaattgcataaactgaacaaattttgatataatgttttatccccaaaacgtaaaattatggaataccattttctcaccaaaaacataaatataaaaataataattaattttaggtttatttggatttacttatatctttttctgaagttttggttagaaataatctaacttttatttgttagatgtaaaccaaaaatttttgtaatttatttcatattatggaccaaataaactttgtaactttacgtgtaattataggtttatgatagactaaacttagatcttaaaatgttttacatgtctatgaaaaatccacaaccttgaaatatgcttaaattcagcttgttttacataatggatcaagtttactgtttgatttttgttgaaaattttactttatattgtagaccaagtccgggtgtctagtttctctagacaagtctaatccataacgtaaatcaaataatataaaacgcatacatttaaaccaaattgaatataagcttattttttgattattttttgtttatgttttgcttaatttttgtctttattcttatatttagccaacctcgtctttgtgatcgtccaattgtgatcaaaattagcttttcatatatatctatctatctattttctttctggttataaaattaagatttcatctttcgatacactcatacacagtttcaaggcatgcaaaatattttaaatcatgtttgaagaaacagctaaactataatcaagtaaaagtttaaatattttattatgattaaaattgtgtagaaaacgaatcttttgaaaatgtatttatttgttcgaagagtaaatataacttttgatcaaaaagatttttttttttaaagtaactatagaagtgactttatccgaaaaaatacaaaagtagtaatagtaggaatataagaacaaagaaacatcaaaaatgctagtaattttatttttaaattgctatgatctcaaagtggaaattggtggttaagtttagggcccgacaattcatttataggatactggcaaaaggaaatttttactagtttagctgattatggaacgaaagttgattggattgtgaaatcgtggacacttacagctttggacgacacacaaagaccaaatgggttccggtcgtttttccgaggttggttacggaagcgccaattatttcaaaaatatagaggttatagatagttgcatacatggaggtcggggaggattagagcaccactcgagtttctcatctgtctccctgctaaggttcaagccatattcagaaccattttgtaatgtaacaaaaataatctataaaggacgttgtatatacttgtggatttcactatgttctcttctttttgtgatctgccagtaaaacccagtctatgggtccaaaccaggctgcgaaatctcaaggccgtgcttcttcactatgtgtatgtatctataacaacaaacatagtaaaaaaaatttaaatggaagtgagaagagtcagagaagaaactcactcttctgcattaaagtgatcaactccaagatcttcatcccatatgaatatataatcgtatagtgctacaatgtccgagtgcaagaatctctttgcataccaccttatattcacaatatgagagagtcaagaaaccagataaaaaaaagtggttaaagcaaagatattgataccattttgtctgctttttgacacttatgtgtattgcattcctcgaccactcaaactcatcattccatgcacttgttaccccatcgtaatgaaacagaacaatagtaaagttctctgaaaactgtacttgagtagacaaatcataatgagtttactataaagcaaaaacagaaaacaaaaagtgttatatcaagcaaccttgctaacacacgcatctatattgtgtctctgattataacccactgtaattgttgctagatatctcggttgtttcactaaatcctgaggaaacagagaaaataaaattgaagctaatgttcattgatcacatatgaaagctgtaatatcaaaagagtgaggacaaacctcatcagggttccccataatctacgcaagtacaagtctgattcggatgcaatgataccggatggtattctctcagcgcctcaaagatttgatggttcccatatctgcaccaaaacatgccttaagctttggtttgttcttaaaacatgaaaaaaggtataaattcctacataaaacatgcctttgagatcatcaatggctttgtgaggagttgcaattcctgaatctctaagtgagtggagcgaagaaggtttctcgggagacttgtctacacaatacaaaaatggcatgcgacaaacgaagtataaaatctaagaagtaaaagatttgaagagaaataagaagaacctcagtgatccataaagatggaaaagatagtccaataacaatgccaaaagctataacaaacaatgctgttgtaaaaagcttcatgctatcatctgatgatctcctactactacttgggctgttataacaacaatcatcaccaatccgattttagagagaacaataagagaaacgagataaagggtcttttttacctgcgtgacaagattcccatagttaggtttttattacaacttttgattataaactccaattgtcatcaacaccatctcactcatgtttatcgataaaaacaaactgtaattaatctcttgagctatacgatcaaaacaaagcacgaatgatctaattaaacaacaatgctacatttaacgtgtgattaaccatgaattttctagacgacaaaacacgaaagtgataaaaagaaaactcgaatttataaaaatgacattacaaagtagaacaccacaaaattttgagacgcatagagacctagctattataacaccaagaagttgcatacatatgagtgggaaactcatatcttttatggggaaccaagattaatttggtcatacgtattcaagagttatctctctaagattgtatttgtttttatttatttatttatgttttagttttatttatcatttagtttctttcattatttttatttgttggtataagcatttgtattaatttgtcatcagatatattaaaaaaactatgtctgtaatgaacattttataataatatattatatatcatttagattaaataatatctttatttagtcaatcattaatgatgatgcggtcttctagttaaggtccatggttttgttaatggctttttcgaatgagtctttgtcgatgaatactttcgtgaaccaactgggaatgtgatgatcatcttcatataatagcttgatggctggtactaattccatgagaagtaccttaaagctatagacatcagcttttgtagttagtcactgtaattacaaagaggagtcataaatcaaatatattggtgatcagatgtaaatattgacatattaaagaagaatcttacatgcttattttggtgcaatgtaaccagctgttccaaaacactttgtcctgatcgattctctgccctctgctgtagaccatgccaaaccaaagtcagaaatttttctaatttgtttttggaaacaagttaattcgtggtttgaccaaatactaaaaaaacgcataggttaatcaaaaccaaattgtacatttgcttatcttttacttatattttacttatattttgcataaaaaaaaaaattgtgtttgttagttccttgtattgttcttcttttttttttttacttaattagtaacattttgtataattattgcagtatcattcaactttaagaaattacacgatttcttccattcaaaaagtaagcgaagaaattacactccttctctcataaatgaggaatgcattctgaaaatttatttgttttactcactgcatatataaacaattcacgttaaaattatgattttttagaccatgtaatagttttttttttaataaaactataaactaaatatagaaagttagaaacaaacaacattgagatactgagatgcatcatcactaaaatttttttaaaaagataataaataaataaatctggcatcagttttttttttataagttagtttgacttttaaactgacggtagaattatatagtcattttagaaagcgatgctaaattcagtgaaactaaaacaatttagcatcactcttttaaatgatgttataatttaagataaacatcatttttgttagtgaggttataaatcctttggtatcatttttaattattgatgctaactatttttagtattaaatttgaaagttacgtgaaattttgattttacattcatatcattactcaaaaacgattcaaattaaataatatgttttttaaaaaattagctattatataaaaagcataatcaataaataggaaaattaaaatagaaaaacatctcatttcataagagaagttctaccaatacattattcaaaattaataattaaaatacaaaaaacatagcttttctcctcaaactaagtaagtaataagagtctcatgctctctatttgcacgaagcaaataggattgattaccattactctcttttgtgtaccatattctatttcttttttgttattagtttttaaacaaaactgtttactagtctatgttctgttatgtttgtttgagtttttatgttaaatttcataacttattatgtataaaattatcgtttgttatgtcactgtattttttaatttaatacattattgttgtatttttaaatttcaattaactggataaccatattagtattgattaaatgcccaatgtatacctaaaacatatagatttgttcgtgtattactgaaaacatatttaaatttgaaaatcattctgaaaatgaaaattttatccaaattatgagtattcattagtcattagtctattttcagagtggatctagtctaccattggaaatagccaaatagttttttttttttgtcaaaaggaatatgtttacttaaaaatagaatttgtaggcagatttgatgttcattagagatatgatgcaagagagttattttctcgagactattttctctgattaattgttgggcttgttcgtttattaatcgctgtgacagcaatagggactccgacgaaaagcaaaaattataacggagatacaaaaacagtcgttcaatatggacgccggcggcgtccttagtgaaaatgttaagttgctgttattttttggcgacacgtgtatatgccttataggtcgctgtttttaaaatcgagcgactcctcttcacataactttctacagacttcaacgtaattgtgtgttaagcaactgtttttttggtcgctggatatgatcgcagcgtttggaaaaagaacaggccaacaaaaaatatttatatcctcttactattataacaacgaaatcgataagaaggaaacaacaaatgaaatgttcttttctaaagtctcaaactaagatgttatccaaatacatttgagaactaattacaaaatgatataacattaataaacaacaaacaaaataaagccgaaaaccaaaataaaaacaagaaaataacgaaaacaataaaaaaaactgcagagaaaaaagccagaagaatagctctcaaattctctcattatcatctctttacaaattcttcctttttttgttactcttaacgcttttttcttcatcgtccgattgtaccgtcactaagatcgacccgccacgtcatttatccacaacaccttaaaaatctctaaaatattcacaaaatcagatcgagtcgccacgtcatcaaagactcgatccaagtcgactcaaccgagtgagttctctctactgagtcttgcatacatctccgctctcagctctttcccagattccacaaattccatcgccggagcttcttcgatctcaaactctcttatcctcggccacgttgccgcctgaatcggacgcagagacgacgaaaaaggtaacctaactgcagatctcatcggagaactccacgaacaaccacctccgttcaattgcattttcctcatcgacgcaataagttcaccggtactcggagaaagcggcggagattccgacggtggtgaaaacgaaggagaaacaagaatcgaagtcggagaagtagctaatcctgagaagaatccaagatctggatctaacgaacaaggtaatacacgtaactgctccgtcgtatgagcgaagaaacagattcttctccggcagctagttccgtctttacacggctgagtacggtaacgagaaggatggagccaacactcgaaaactccatgagagaactcacacgaatcacctcttctacaacttcctttacgaaactcaggacaagcggtgccggagtaatgaaactttctcggatcacgtcgtcgagctttttctccgggatgtgcgaacggacactccgtccaatcatgagatcgacctcgagcgcatcgccggattttgaactcgtagatgcgaaactcgtcggaggagaatgagtcggtgagtggtgatgactcgtcgccacttgatgagtctgaatcgtttgttaactcgtttgacgggaggtaacggaagagagaagcgaaggagtcgagatacggtgacggagagtgtgggtagtcgttaacgctgttaaggttgacggaagagaatggtgaagagattgtggccgttggatcgttgatttgatcccattgagggatatggatcgttggatgtggccggtttttattttcgccgatcatcatttttgtttagtgagtctagaagagagagaggtgtgtgtctgtgatataaactgctttattttaaccatggttgggtcaaatattaactacggtaaagttatgaaaatcttgaccctatccacaataccgtacggtaaacaattaataagcgcaaatctgcagatgatgacacgtgtaagaaaaaatctccaatttttgttcgtcttttgtttttttccccttcatgttcgtctttttttttttttttttttcttcatatttgtccccccaaaaaaaaaaaaaatgttttcaaagctttaaaaatatttaaaaattttcaaatttattttttaatcaatcacacttttaaaactttattaatttttaaagttttaaaagcttttttctctccatttactttttttcttttgtttttttcctaaagtctttaactttaaaagagaataataaaacaaaataaaaatattttttctttatccataaaatttcaaaactcttttcaaatttatttatattttatcattaaaaaatcgattgattaattcgaattttattttttctgttcttttcagatccaatttaaatatttaaaatagtgaatttgtaaaatgaattttgtatttttttaaaataaatttattttagttactattttaccaaataaattgattttttagcataaataatatttataaaaaatattaaataataataaaaataattgtgatttttttgtaccaatcagactttaacagttaaagtttctatcgtcaaaatttttacaaccaaaatttttacagtcaaagtcgtaacatccgaaatatttagagttcaaaagtaacagccgttaccaatcagccccaacatctactttattacgctttccgttttaaattaattgtcagaacattaaaaaaataattagaataaatatcaatttacatttttaaaagctaattttgactacaaacaaaattaaagttttatttgcagtgatttatgttttaaccaataagaaattttgtaaagtaaaaaataaaacaaattattaatatgtgtgtcaaaacctaaaacaacatttttggagtatcactaaccaaaagttatatagtcacataaaacatagggatacattaattgaagaaattaagatacacattaaaaattgaaaaaaaaaaaatttctatcataactcaaagtttatcaccaaaaattgtgttaattattccgtagctgttatttgtttataaagatttagatcattttgaccagactgtaactattagatcattttgaagaatcgtagaatcatactattttatttgcaattatatgaattagtccacactaatattaagggtctagcgatatgaaacataagacattacagtaagaaaatatttggacggtacagtatatattacttgtcacgtgactttcaaggtcgtagactactccccatgacctgacaagagtgaataaatttggttattgtcccccattttttctagatcatggaaggatgcaacgtacgtagcttttatgaaataaatttcgaacattaattttaacttttggctctccagctgatgggagtaaattgacatgctccaaagaaagaaacacaagtcacctagtgattttcaagaaaatgtgcttccttcaaaatatccgaggtctaagatgaaatagttttaaaaattgttatgcggggcatatattattagagtgttgtgcacttgtaaccttccagaaaataagcaatttggacgatattttaaggtttggtccatgttccagtatcgtgttagggtccactgcttcgagatctacttgattgatactcttccatttgttttctaattgtttgatgcaaaggttatccattaagggaaacttatctatatcacgtggaatactcactgcaaaagattcgcaatattagacttataattgtcactaatcagaccattaaacaaatatcaaattgattaatatgttgaatttaataatccaatttgacctctttcagatagggctttggggacaaatcttcttaaatcgcaccaaacttttattataagataatttttggttcgtggctattaaattaagcctgaaaatttaaacatatgtttcacttacaagcgtcaagtatggataaacaatgattaatcataagctatcataatgacaaaaagaagtatgatcgttatcagttctcttatgcataaactattgataaaattataatagtcacgagatgattgatcgagcacgataactattataatagtcacgagagaatgatgtgaaagtttaagaatgcgtctaaaccaacaataaaataatttaaatagttataattgaatacacattctatattagtaaacattcaaattatttaaaatatctacgagacacaatagcctcccaacaaccattcgtacattcactttctcattagaaagaaaacgtatcctaatttgttgttttctctatgaatgttaatatcatctaataagtccatatagactatatctaataaatccatatagactattgtctctgaatatcaatggatttgaatctttggccaaaaaattaaacaaagagacaaatgatgtagaagtcacattacatagtgggagttaaaattaaccagagtttgcattaggttgcaataacgcttgcatttacgtcttgcggtgcttacgttctgaatctctttgtcgatgagcttgaagatagttgatattgggatcgagacttggttgtgaaccacatcattcctttgcttccacatatatcctaacatttatctaaacaatctggtgctagaagaaagagattatcaaactgatgcaatgacaaactacgaaacaccactccataacaaaaaaacttaaccgtatatcgatcctcaactttaggaataatcctaacgccgcacccacccggcacctggcacccaccacttgaaaaattcatagctcatggccagtagggaaccgcggaggaaacttactcagtccattgcgaggataaggacaaaagtactccttcaattattctagaaaaccaatcagacgttgacaaagaacctcgtttgaaagtacaactgctctacaagactgcattgcccactacaagcagtgaatgttgtccaccctcagcttctttatacgttcgtgaagcatgcatgtgcattttgttggtgcgcgcatagtaagccatgccatgcaattcaatgccaatggtttacgaacatatagacaagtaaagttttcaattatttcatgagtacctaaaaaccacattcatagaacagtttgcaagtattcgaaatttgggaaaacatgcatacgacctcaccgcatctctcaaaggccgaatacaatttttgaggaatgattaaacaaagaaatatttttacaatcacactaactacaatacgttcatgaagacaacgtaaatgacacgagccatttagcgcagccttcgaaatttatttagcgagtatagataaagtggttcaagccttggtattgatacacaaaattcacaaaccttgcaattttctttttgaacataaaaacaacaatattatttcaaatcaaacggaccacactcaaaactacatttacatataccaagaaagccaccatataattctagaagccagacggtgaccaagtaattggcatttattaatttacttaattcgttatcatctttccttacactagctatttcacaatcataaaacagaaaataccgatcagcaattaaacacacaaaaaattgtatggaaaatagaaaataaaattttagatagatcttttcaaaaaggtaagaacagtattaaaaaaacatacgtaggataatcataaaacttaatacaacatatagatccatataattattaaactctaatgagtagttgttgtggtttggtgtgtttgttgtggctgcgagtgcgtataatgtcccaactctttggctttctccgctatcctcatcctcgcgtaatccaccttatccgctcccatcgggtgttttccggtaacgtacttataaatccacgttaacgccgtagctgctgccaccccacaaccaccggagaataggaatcccatcgtcaaaagccctatcgttatcactgccggtaccaacaccgggctgaacagaaccatcaacggcgtcgctacgatcaaaccgatcaccgttccggttagtgttagtcctgagagcacgaggagtgataggccgatcgtagctgccgttacgaatctcactatctgccgagtcgatggtgatgattcatggagactcctcattattggttgttgttgttgctgatgttgttgatgatccgccatttctttttttctttttctaagagagtatggatttaatgttctatgttgtttttgtagctttaataagcttaccatttgtgattattatgaagaatgaaaatagactagtatgaaggagaggctaaacttaaacgagacatgtgtcgaacgacgaggcgtgttaggcaatggagaagagtgtcacgcgggcgtgtcagttctgcatggagctactttgacgaggtactgacacgtggttacttagttccgaattaaaatctcatcgtcaaacgatcttgaagcttattgggctattatctgggcttgtagtgactgtatattatcctagtgattatgaagttggaataccgtgggcttaataatatctgggcctgtagcgactgtatcatctcgggagacaaattatttgaaaataaaaacctcgatgcagatgtatcaacacgtggcagcatctggattcgaccgttgctgctttgctggtggtttacgttttttcccctttttaaatttctcaatttggatctgttccctttgtgaaaattactctctcttctctctttctttcttctctttctctcgctatcttggctcatcaacgatctcttccatggggatttctacagagacgcagcaaattgtaagaaaataacttgttcttggtttcacaaattccaatttcatttggttcttttgtcgaatttgtttcaatttagggttttacttccttgttggtttgcgttttttctctgcgtttggtctgttctaatggaatgtgatctgggattatcgatttggttgcttgattttctttgcgccagaaagaatcttgtttcaatgttctctgtttaatttgagaaagacttgttggtatgattttgagaaatttcatgatatgattgtggatttattcgtttacagcgaggaccctagattaattgacaaatccgtggattagtgttaaggagctgttgattttatccttttatcttcaagttttaaagtatcaatgattgtttgtcgtttatgattaagtgtatctgagagttgattggatttcaatctttgtgataatgttgtatcaggcggcttcagaggctgcacaaaagagatggactacaagcgatttcgatatcggaaagccacttggtagaggaaagtttggccatgtttatctagcaagagagaaacgggttagtgtttcttcacaattatgttaaacaagcagaattaatttgatgtcttttttaaccaagctgtcttctatgtgtctttgcaaacagagcgatcacattgtggctttaaaggttctttttaaggctcagcttcaacaatctcaagttgaacaccagttacgaagggaagtagagattcaatctcatcttcggcatcccaatattctgcggctctacggttacttctatgatcaggttttgtgttatctgtgcttgtaaaagaacttcttgttgacatacaatgtttggctctgtgaggttaacatagtttttgggataccgttgttgcagaaaagagtttatttgattttggagtatgctgtaaggggtgagctttataaagagcttcagaagtgcaagtacttcagcgaacgtcgagcagcaactgtaagtcctagtgataattgaacttattctagcatgttaatgtgaatctgtgtagtcatacccttacgtttattgtggcagtatgttgcgtcattggctagagccctcatctattgccatggaaagcatgtaattcacagagatataaaacctgaaaatctgttgattggtgctcaggtaacaaattgaatctggttatctttctccatcaacgccatgtgattgcagttagcttatgtgtttatgtattcatggatatatgttttcagggtgagctcaagattgcagattttggatggtcagtacacacattcaaccgtagaaggactatgtgtggcactttggattaccttccacctgagatgggtaagagaaagctctctctctcttgtgtgattctaaattactttcttcggcaaccagctaattgacttttctgcttttggattcacagtggaaagcgttgaacatgatgcgagtgtcgatatatggagtctaggaattctctgctacgaatttctttatggtgttcctccttttgaggccagggagcattcagagacatacaaaaggtaacatgttcattaagcgtagaatgggattagtatatgatgtttggtcagtggaatgtacattaaagaagggttttgttcgacaaatgatacaggattgttcaagtggatctcaagttccctcccaaacccattgtgtcatcatctgcaaaggacctgattagccaggtttctactcgcattcctcgtaaatctctctaagtgtttgtgcatttgaagagtgaattctgattttcacactttctgatcaaacagatgttggttaaggagtctacgcaacgtttggccttgcacaagcttcttgaacacccgtggattgtgcaaaacgcagacccatcaggcctttacagaggatgaagcgatgaagctaggaaaagatttaagattgcattcttggcactttgcaccacttactgcaaaaagtctgaccatttcatagttctatatatgtaattgctgtgttccaaaagtatttgtactacatttttctacgaagtttatatagccacaagattcgtgtaactttactccaattattttcgaatcctacatcactttttaaataaaaattgttcggaatggtttcaaacttacaacagcttttgttcatcggtaacttattcaccaattgattggttaacgttaactgatgttactgcaggtaaccaaatgagatggatttgttcacaagagatccggaacattttttatgttgtaagatgcaaaggtgcaaaggcaaacgaatgaaagattaaccgaacatgaacaaaacaacaagagacgcactctgcaatcaatcattttccttcaaaaggtgggtgaatgagacaagaatgaccaatgtttgtcttttatctgtaagacaaagaagaagaataatgcctacttaacctcaaaaatttaatttggtgtatcttgtacttaaatatggtggtggagtctcagaatgcgtagcggtagatggcatcagcaacaccatcttggtcgttgctcacaccaatcacatcagccaccgcctttgttttttctgcaccgttgctcagagcaactcccaacgaggccagttgcagcatctctatgtcattttctccatctccaatcgccattatctgataagaaaatccgggttgcttcatcaactatcttattttttgtttgacttctatacttatgcctacttgagtttctttacaacgccgtcaaaagatgctagattattacctcatccggtgaaacgcccaaatgattgagtagcatttttacaccattccctttggaggttccgggtgggacgatttctagcatgtctgattgagcttgaacaacattagcacggtctcctgtagcttctgaccaatacggacggataacagatgagactccctcggttgtgtccataaatatcactttcttcggatacacaagagaaccaaacatcagtactttggcttatacatatgtaagaaagtaagatataagttctgactccgggaattacctgaatgtcagcttcagctatcagttgatcaaccgatgatataatttcggcctgttaaaaatcatggagagattagcaagaagctgtcaaaaatcataactagatggggagagagcgtgcagtttcattaacctacctttggctcattgtagattgtgtgaagagagtcgacaagagggtggtcaaacaatgtcaagcagcgatcctggctgaatgcaatgagaggaattcgatgctccaaagaataaagacaggtctgtatataacaaatcaacattttagtaagtataagataggattcctagaactcagttattcaatcacgatacacagggataataagttgagcactatcataggtacttaggtagctttttgctgcttaacatggtagagaattacatgatgcaaagagactgggttccagaattctaatgcatggtttgtgaactaagccgaggatgtgagaattaattctgtgagtcgttgtagtctaaatcctaagtggacttacctctctgcagacatctcggtctaagtttcctcgatacacttctttcccttgtctaccatagacaagtaatccctgtaattaaacagatatttagtgagactacattgatattggtgcacctcactagttccctgatgttagagcaagtaaacctgaacgaaaacgcctggagaggactctgagataatgccatcggatccagttagatcagccgtcttcaagattctgatcgcacctgggcgggactgtgataaataaataaatttaggaacatatcctatctccaaaacatttcaaagacaagcaaatattaaaaaataaggaaagatattgttggacagatcaaagaatagtccaaacatgaagtcattgtaaaactgctgtcttctcaccttccccgtagctatgactactttaagtcccctcagaagggcttcttttaaagcttttgcatttgcctccgaaatctgacttttactgttaagcagtgtacctaatagagttcacatcaaaatcccatgagaaagcgaagaaaaccgaaacaaacaactacacattattaaataagtaaccttaccatccatatcacagaatatataggagaactttggtttgtacaatcttaggccatccccttccttcctgtctaataacagtagtctgtaagtttatcttagcaagaacaagaagataatagggggagtgtaaatgatcgttacacagttgcaatttagtatacacaggaaaaataccatctgatttctccggctgaactgtagttgttttttgaatgtcatatgcactctgaatgagtccttttcctttccacccaaggttttttagcaacaactcctcttcctcttccatttcttgctcagcctcgtcgctgatttcatgatcaaatcccagtagatgtagcaacccatgaatctttgaaaaaacatttaaggtatcagcaaatagagactactacacaaaccatatgaaaccacctgaataaaaaaacaaaaattggctcctacccttctaatatctttctaaacattatggaaacacagtactgatttcttacatggttattgaaacaacaagaatcctaaaaacccgcctagaaacttcacattatacttcaatgttttggttcacagtaagtcagtaacggatacaaactccacaactattaatcttaccacaagaatgcgtatttcatcaagaagagtatgccctctctctgcagcttgccttgcagctgtctcaacagaaatgacgagatctcccatcataagctacaagaagaacgaccataatgagtaaccattggaaccatcctgttaaaaaccagtaaatcaaaaacaaacacttactactggaagcttcagttcagggacatgttgtgacatggaaagcacatcagtagcatgatcttcacctctccactctttgttgagtttacaaataaaatcatcattacaaagcatcaccgataattcaacagtttcatacccaccaagatcttctatatcagtctctcttgttttatactttgaatctttcaaaccattgaaagccaatgtcattgccataggtacattgagacgaagcatttctgcaatattctacattgattggaatttgataagaatctaaaacaacacaactagaaatggctaattgattccaaattcgattatcaaagaatactcaaacctgaatctcgagatcatcaggaagctgttcttcgatgcagatactaacactaagctccaattcctgtttcttcttcggagctctccttctaatcttcctgtattctctcctctccgcaaaaacctgacccggcggtttcggaagctttctccagtctcctacggtgctgcgtaaagcgtggaagctccgacggaacatggaagaaaactccgatgaagtaacatcgagacgattcacaagagcagttttgggggaagagtggaagaagttgggttggaggagaaggagggtggcgcgtggcatttcacgcgcatgagcagaccagatacgattatagcggagggttgggcagacacgagagagcattggagagacacggaggcgagagaaggaggcgtctctgcacttctggcttaaagggtggggagatacaaatactaaatcgaaccgagattattaaaatctaaaccgaaaatgatttttatcataaaccggatggtcaacatttttaccaggaccatatgagaaaaatgaattgggggctgggggataagaaagaaggggaaatcatgaaattcattgctttttaaaccggatcaacgatcgaaccggaaaaatccttgggtcgcattcgcatgtcaacacagttgggaccgggtttgaagatttttacctccaaaatcagatgaccaataaaacatattctgttgaattcgatttaaccaataaaaactattgtcctttgcttctccttctctcccttctttgaacaagtcaaaattgattttaatccgtatgatattttccgctttctttgacttccctttgaaaattccagtcgagagctttccctatccatcgatttagggtttccgatttcgttttcgagcttttctcgctcttctctcactttttctttcctcctttggctcttttctccttcttcaatctctctcccatgactctaaagtctccaattcctgttagattccgaattatcatgatctgggtgcttaatcagatcgagatatctatattttgtgcttgaatcgcctaggattttctagtgtttacgcgtcttgtcatggtgagtactcaacaacgcacggacgatgactcttctcaaccggtaaaagcttctcttaagagctatgggatcacggagccactgtctattgctggaccttctgctgctgatgttaagcgtaatttggaactagagaaggttagcgttgtgtttgtttgtttttttgttccaatgaaaaattgctttcaggaacaatgtgatattgacttgcgttttggctgatttattgtgaagtttctggttgatgaggggctctacgagagcaaggaagaaactatgcggagagaggaagttgtggttcgcattgatcaggtgattaagagcgtctggtttattgctttctcatgatgataatgcttagactggttctcacattttctttttatagtgttgtagaccaacgatttctatgccgtaattataagatgattgtagcaatatgtagtctagtccttctattaatcctattggctcatttgccatgtgaacacaagtgacttataggcgctaatcatttgtttgatagtttactctgctttactgaaatgtagattttgggttagctgctttctcttcgatgtcaaagaggctcacagtggtgtttactgaaatgcataatggtcaagttttgtttacagtactaactatctaatctaacacatcttcttccttaaacttcttgtatagattgtaaaacactgggtgaaacagttaactcgtcagaggggctatactgatcagatggtggaggatgcaaatgctgtcattttcacttttggatcttaccgccttggagtaagttctttttaagtttaaagttaaaagatcaactgcatctaatcagtttggggaaaggttttacttggatcatatattttctattgagccttgtgagtatcttgaattatcactgaaatgaagagaagtagcattgtattcgtctctacattactagttgagggtgaaatttttattttgttggtttgcaggttcacggacctatggctgatattgatactttgtgtgttggcccatcttatgttaaccgagaggtaactattgagtttcgtcttactgatgtaaaggtctggtgggttagtttagttgctaacaggttatttttacaggaggatttcttcattttcttccgtgatatattggctgaaatggaagaagtgactgaacttcaacctgttactgatgcccatgtcccagtcatgaaatttaagttccaaggaatatcaattgatcttctgtatgctagcatatcgcttctagttatcccacaggtaacatcaatatagcctttttcagtttctgttgaaagttagggggtggttcatgatacctgtatgtttatcttggatttcatttggtgggtttggtgcgtgtattgattgcgtgttgatggtcacatagtattattatacacttcctccaagggttgaggtgtcaaagaaacttcttataagaaattgttagccttagtgaacatggagatgttgaactgccgtgttagcaccatcaggcttgatttatatatgagtactgagatgagttctcgacaaagtttataagttcttgctgaggcagatcccctttttttctggaatcaatttattaacaggatctggatatctccaactcttctgtgctgtgtgacgtggatgaacaaactgtccgcagtcttaatggttgtagggttgctgatcagattcttaaacttgttccaaattccgaggtaaagtcgttgagtgccagttgtttatgttataaactaaggaatcatgtaagccatctctgatgtgatgtgcaaatgtagcacttccggacaacattaagatgcctgaagtactgggctaagaagcgtggggtctattcaaatgtaaggtggtgtctttctgaatattacatctgttgacaatattcttaggttaaagctcttgtaatctctgttatattgagcaggttactggatttcttggtggtgtaaactgggcacttctggttgcacgcctttgccagttttatccaaatgctattcctagtatgttggtttctcgattttttagagtatatacacaatggcgctggccgaatccagtcatgctttgtgcaatagaagaagatgaccttagctttcctgtttgggacccacgaaaaaatcatcgtgaccgctatcatcttatgccaataataactcctgcatacccatgcatgaattctagttacaatgtctctcaaagcactcttcgtgttatgacagagcaattccagtttggcaacacgatctgtcaggttaggaagcataacacccgattttgtttatgaaaagtttacccaggatcctgttgctaactaattttttatatgcaggagattgagttaaataaacaacactggagttccttatttcagcaatatatgttcttcgaggcatataaaaactaccttcaggttgatgtactagctgcagatgccgaagatttattggcatggaaaggttgggtggagtcacggttcaggcaactgaccttgaaggtagatagccttatgttcgtttaatgttgtggagtacaccttccgtgtcctcagtgtgttctcgaattttttactgggagaataaacaatgatttaaggattcttcgtcttctctttttatatccaataatgcagatagaacgagacacaaatgggatgttaatgtgccaccctcaaccaaacgagtatgtagacacttcgaagcagtttcgacattgtgcctttttcatgggcttgcagagggcagatggatttggtggccaagaatgtcaacagtttgatatacgtggaacagtggacgaattcaggcaagaggtaaacatgtatatgttttggagacctgggatggatgtgcatgtttctcatgttcgaagacggcagcttccatcttttgtttttccaaatggatataaaaggtctcggcaatcaaggcaccagagtcaacaatgcagagaacctggtgatgagggcgttggttctttatccgactctgttgagagatatgcgaagagaaagaacgatgatgaaattatgaattccaggccagagaaacgtgagaagcgcgcatcttgtagtctacatactctggatgcagcttctcctgacagcagtggtatcactactagtgggactcctcagattggcattgttccaggtcctagagctgaatgcttagtaactggtgatcttgtttgcaatgttacaagtcttcctaacgtggaagttgaggctgaaaagtttatcagtaaaatcacggaactaagaaaattctctcagtacgagcatacctctggtagcgagcaaatcctggaagtagatagtagggctctagttcaaagttatcatgacctggctgagcctgtagcaaaacatgtgagacctgaccttagtgctttgctagcgtgtgaaggtgggcagaataaagaaataggtcatgatatgggctctgaatctattaatgacactgacacgcaacatcttccaaggcgactaaatgtaaatgaagatgttgatgaagttgagagggaagccaagttgggagaaattgctggtggtgttttgtggaatggacactgtgggcggaaccttgaccatgaggtgagtttttgctgttccatgactatggatactgggggcggaaccttaatagtactgggtatagtgatcatgggttgttacagggttttgtgactcctgcaaatttggattcagctgtggaaaatagaaacttgcattcagacggattgttcaaaagtggcttgccagaagaacttcaggtttttattctaactcatgttatttggcattaaattcatgcgtctgtagttttttttggcgtttggttactggtttgagatttattaattatgatgccaacgatttatacttaaacatttgtgacttgtgagtgacacacccactgcatgacatgttgaagggtgctcttgtgcttaatttttagaatcaagaaatacgaggtaacaaacttaaattagaatgttgtgctgcttaagtgatcaattttatgctttttttctgccatgattttattctgtattattgcatacttgtactgtcttttgaaactaggttcttttctcttccaagatcatttctgacttctctccttctatattgtatttttgtgtcttagtcaaattctttgctcagcgggacggggaagctggacgatggagctaggtcagaatctttgcaaaatgaaatgatgaggcatgtgtttttgcaacccattattggtttatgcaaatcatgatctctttatgctcttgttggttttcttggtactttttatagcagcaggaggttgagcttgaagtccgtagcgtgagcgaggtctccgcaattgaaatgagaacaggaagtcaagaaaaaggaaaataaaaaataaataacaagaatcagagcaaccctagtgtgtttgctttggacgaccgacagcttcagaactcgaaactattggtaagttcacctaaatatgaaaactaaaagcttaaaaaggaaaaaaaaaaagttctaaaagagaaaagaaaaaaaaaagattaacaaacattcaaatgatttacttgttggattcttggtgggattgtgagtatccaaactctgggaagaatgaggcatgaataacgagtttgggacacaaaagacatgcattgttcgatattatggtccaggtgaaatgtggagctgtgctagttcaatgcttttgctgagagagatacaaaattaaaaagaaagaaaccagtgagatcaccatagaacaaggcaagtgtaatgtatttgtctgcctattcaggttatttcagacttgtttttgtatattatatgctttgagatttgggaactttcaatattataccattctgtgcatagaattctctcctgctttctgattgctgctcattgttcattaagaggtttatgaaaaaagttgagagaaatagagttcttttctcaaccctaagttgtatctgaaactgtgactatgataattgaacagatcacacaagtgatgaacgaattcttacttgtgtttattctgtaacaaattggcactatctcagttacatagtgataaactttgagagatcgcggttattgcaaaagattataatcaataataactcaagaattaataaatatttcgcaaagtgcaactctctactcttttcttgtaacttcaaaaatgccggcaacaaatatcaataggcactactatctcagtatctcctcctctgatagtatcccatagcttgatacatattgcgcattgtgacagctcccaactcctcggctctatccgcaccttctgacaatattttgtccaaatactctggttccgctattatctcctgataacgggcctgatgtaaaacatatacgaaaccaaatactgtatcacattaacatatgcacatgaaaaaatgcccttcatttacttatggaagctgcaaaacatcgatgaaatgggacaaactcgaagaaaggtattggattgattcagaattttgacttccctgacctggattggactcagatgttcgatcaaagcatctgcaaggagaggcttaaatgtaccccagctcatatctttgcattcctccatcacttcctgcaaccgattaaaaatgtggtcaccggattatatcttaagtaatcattgtagtcaagggagtaagagacatgtgaaagcatctccgtgacccaaatctaaacattatctctttctccatacctcttttttcttgcctgaaacaatctgatatattgagaggagattgttgcattcaggtctctcagcattgtcaaattcaagcctgttggaacaacaagaagcagaagctttcaacattagatatctcaatttgaaaactgaaatggtaacaagaaaaaggaaaaaaaaaaaactttgtgcattgcaagaaattttttagcgacataagtagcgctcacccagcaaatgagtctgtcttgcaccgttttatcttgtccacaatcaactattttcgaaaggagggatgagaaatggatttagtagcagaacaagaacacatacaaagaacatgagtgagttcattttacttacatcttttgagtcaaggagattaatccgggactgatcagaaggggcagacttggacatctacaagattacatgacagtaagaccttagcgataagtataaaattcctcttgatcatttgaaaacaacaataagtaagcccaaaaattggattagttcaatatgatattctgaccacagttagggaggcaaatttccagaagtgtgttaatccttacaatttagagagaaactataaagaaacagactagctagtagtaaaactctatttgatgttaaataacatgaaggattatctcaatatatttccaataggatttgtgaacgttattcgtcttctctacaattttatctattgaagaccaatagtgacgcaactgctgaatgcagaaagaaaaaataaatgaccagaaaccttaaagtagctgtgaatgaaaacatactaccttggaaagaccatcagtaagagacataacacgagctccagcttgtggtatgagtggttctggtatctacaaacaagataaatatgaagaacaattaaccatctgtgataaataaaagctacgaggatagacaaaggatttcgaaagtctcaccttaaagagcgaaccaccgcggctgaaaatgaaaattgacaatgttatacggatgagggaatacaaatgaaggggaagttaaaccaataagaaacatgaaaatcatagatcataaagacttgtatgactggtatactcaacatactaaatgcacatacaaaatttcataccctccaagcttcttccacttctttccaccatataaatgattcacacgctgtgcaatttcacgggcaagttctatgtgctgcttctggtcctcaccaacagggacaaaatcagactgcagaggcatatggcagagaaccaaacaattcagtaaaatggtcatcccgcaagcaatcagcaggtatttctatgcactttttaacagaacaacgaaacaatcccaaaaatgatcgccgaaaaaatcttacatgagcttagctatataagatcattgttttacttgtgttccttcttcattacaataattgcaacacacttaaactactttaaagcatcacctgatacaagaggatatcagcagtcatcagatcaggataagtaaacaaaccgacactagcattctcaaccccctgccaaaaaagacgaaaatggaatcagtaaacagaattctaaatgtatgcccaatacattagaagattacatatgatatctaaacaagtatacaaagaaatcaacaacaaaccttaaatactattaagcaggatttcgctttcatttatttaaagcacataataatgtgataagaccatgaagcaaccatatacgcacctccttgcgtgatttctctttgaactgaatcattttctgtaaccacccaataggtgtggatgaacataaaagccacattaactcgacatgagcgggaacgtgagattgcacaaatactgaagccttagagacgtctataccacatgctagataaagtgctgcggtatccgttgttgcctttcctagttgacgtgtatcatatggaagtgttatctacatagatcaagcaagatatagataaacaccgcgagagatatatcaccaaacaagcttccgaaaggtagataactcataccgcgtgatggtctacgatgataaagagtgtttcatatgtatcctgcaaacatataaacacaaaacgcctgaaaaaaagattaaatttttgtagcaaccagaaaatataaaaactgaatccttttcctaaagtctttaactttacaacaaacaatctacttctcacacactagtgaatgaggaagtgattagaaaccagaaaaaaaaaactgaatccagttcttaaagtctttaactttacaagaaacaatcttaaagtgataaactttgcaaatgtctcataccattggtgaatcagtaagtgattagcataatggcaaaggagagagagagaacctgaagagcgacccagtttttgatagccccgagatagttgcctaagtgaactgaacctgtaggctggacaccagagaccacacgtttcctaccatcaaaatgggatcagaatgaattcaacagagaatgcatagctaagaagtaatagaaactagaagcaggtagaggccattactttacagaaggagaagtgtcatctgtggcgacggagcaacagcatcggaacccttgtccggtgaccgaaatggaagaaaaagagccggagagagaggtgggtttggagagtaatctagtgagagacccgagacgagagaacctggaggaagagaggatgaggaagtgagagagactcgtggcgtgtcccattgtcgttttcttctctttcactctctctctcgaagaagaagattggggtttataagcaaaggaaggattggtttttgagtccgtgagggtcacgcggctcaacaacagatttcaagtcaaaatcacaatcgcaactttttccaagcaaaaagaagttttttactcgcttatcctagtttcttaccttaaaccaatataacattgagaaatcgattgattacctcattccctctattctcaatccacaccaaagactatatggcctcccattgctccatgagagtaatcctcctcagattctccaatggcgtctcttccagatccattctcaactccactaaccatcgtcttcttagtcttaccatgaccaacactctctcgtctctttcctcaatctctccccacactactacttcgcatttcacggctgcgtcacaacaatcagatgaccagaactgcttccgcaagcttcaactcagaaagatttcgatttcaactcctctttgtatgggtcgtcgttcttccaaaatcgctggtcgaaaggttcgttaagcttctgagtttgtgggttcatatagattagaagtgcgttggtgctattactaggttttaaaaatataaaatttataggttttgatgagtctagagctcgtaattgtttatgccaaacacctgtttgatgaaatgcctcagatagagagagttgttttgattatgggtttatatcaattaattgtgttattgtaaagagtctagctttcagtgttatgtcactcttgaaagctattagctaattcaccatgtttgaattgtgaagcctatagtggaagtttctcttgctcgtgtagtatgaatttcagaatgtgaataacaatcttcctcttgaaagttgtggtttgtttttgtaaatgagaattacatattacagcagagcagaaagataaaactctttttccaagacgaagattgtatttaagaacttttgagattgaagtttctggtgaattacagggcgctcaagattcaaagaaggcgaagctatactgtagaattggcaaggaggttgtatctgcgtaagtcttcaacatttttttcacaatgttgcatcttttttttttgagatgaaattttgcacattagttgtagatatagatggtgtttagtttgttggattcaacttcttactttgttatggacatatgcttactagaaaaagtatcatctgtgggtttatcatcatgcagtgtcaagaaagggggtccaaacccagtttcaaatacgactctagctactattcttgacaaagctaaagaactggatgtaccgaaagacattgtggagcgtaatattaagagggcttctgagaaggggcaagaagcttttatagagaagatttacgaggtgaggtcatgagcttcaattctagttttatgtttgtaagtggggccgttatggtgaatcatcctagtaaggtggggaaatggcctggtaatttaaaacctatgaatctgttttagttcatcactctatcaggccaagtatgtggttactgtagctaatataacttcactacctcagcaccttgttcaatttacaggaccataaatccagttcctcgttatcatttctttgggtccaattataagatttgatgactctaaaataaacttgttttcaatgctttaggtatatggctacggtggtgttagtatggtagtcgaggtcttaacagacaaaattaatcgatcagtggcagctattagatcggttgttaaggattatgggggaaaaatggctgattcaggatctgtcatgttcaagtttaaaagagttagggtagtgaatataaaggtcaccgaagctgacaaagatcagctccttattattgctttagatgctggagcagaggatgttattgaacccccaacttatgaagatgatactgatgaagacagggaagagaggtatataaccaatataatgtctttccgcatttcttttcttcttgtcagtattacatttattattttctgttgctggtgaatcctaagttagggaagatagagatagtcgactcacttattcaaatgcgttagaaatttctttcaagattgaattgaaaaagtaatcaagcgactgaaggtagacctagtgtattttcttctcataaacagctaaattgcaataaaagtttcacaccaaacgatttgaaataagaaatccatcttgccaatctaagacgagatgatacctaggtgactcataactattatgctctttttttgtttcatcagcttcttgtctctatatctgttcaggtactacaaaattgtaacttctaatgagaactactcaacaatattatcaaagctacgtgatgaaggagtgaacttcgagcctgacaatggctctgaactgctccctctgactacagttgaggtatcaaatctcccgctctgttctgtaacctctgtgccctgtctaatattaacttattgattctatttttatcgtcaacatgtagtttatcttctcttaacgtgttaaatacattgtaaattgcatatgctacataagcataattggaaatggcaataaacttatagaaaatttgtttgtgttcttcgttcgttaattttaacttcttgttccgcccaaataagagtcacacccttatcagtattcatcaacgattcacttggaaaatgtaatcacttgggattgttgttggttgttgcaggtggatgatgaggccatggaattgaacaaagagctaatgcagaaactactagaacttgatgatgttgatgctgtttatatcgaccaaaaatgaaaagaatatacattacaggaagctccacttcaagatctgtgaattcacagctcacgagaaagttattatgtcaatctctgaactggttctgctgaactctgcatatattctgaagaaggaataatggtttttggtagacacttacatttcacttcttctagtttccagtttgaagccataaaatcaaaactattataaaagcccaaatcttataatgccgaagggtcttttaatctaaattttgggctgtttcgatttttgggaaattatgaatctaaacattattttagaaattatgagtgatactaggagtgattgtgggctactaccaaacgttattttagaaccacaaataaattcaaaacattattttagaaattatgaatctaacttttgatattataaatgtaacttcttcttcttttttggttaagggattcattctacgaacgttggaaatgcatataaattcataagtcggtaatgcttatttcgtcatgattacaatgcaagattatactgacattactacatttttccttttattcgaacacgttgatccattcctttttggagtgttaaaattaattcattgacaatgaaatcgtaaaaggagtctttcgccatgttttaaatgcttgttttttggacagttatgtcggtgataaattatatcctgtacgtaatatgatttttgattttcatatatatatatatatagagtgaattgggcaactaaatataaatttacgtatcacaacttaatacttctctctttgaaataaactagatgagttgataaacattacaaacaaatgctctcttatatttaaatatttttccttcttaaacatatatagtcttatagatacacaaagaataacatattaattaagtacaaagaaatgatattttatgtttgttaatagaccaacatattctaaaaacattttaaccatgaaatttgaaaaacaacattaatttctttaataaatttacgaggttgaaagaatatttatgggaaaagagaagcacaaaaatgctgagaggaaaaaaactattcaaaatgcaagacggttgaagatgatttgaagcattttcatatgtactatttaccgaaaggtcattaatcatccaaacaatttatgttgaagcttaaaatcattacatttaatttgtgactcatactttccatctaattaacacgttaatttaatcaaaaaatttcgctatcgagatcttaatgcaccctcttgtttgacaaccacaaaaagatgcatgattgatgtgtattgtgtacggaagaaaactttaatttagtgattgaaagtttaattaagactgagcctttgatggtctgaaattatataaatatataatctatacaatttactatgtatatctatgctttcttttggaacgtgagactatgaaaaccattgatatatgggtatttcagattatagggttttcaaattagggattatcttcagacctttaaatttctgaataagtattgttcttcctatttgacaaaaaaaaaaaaaaaaaaaaaaaaaaaaattgttcttcagtctctatatttctgttttcattttaggctgcctttaataattctcaaatacaggtttaaactcttattgttttaagaagattaaaaaatataactagaactggtttctgtatctgtatttcaccccgcctacacatatatagccggatcaatggcataaaatgattccttgttaggtgttttgtgaaagttcgtcccctgataagttattatatagtgatatagtagtactgctattaataaaaatcgaatccgagttatttggacacaattaagattgaaacagattctctgttagtatatgttactttatgtgttaatttttaatggtctatttttattgtatatgaattatgatgcatagtttttgtagtgtatatgcttttattttattcttgtttctctcttttttcgcggaggatttgagctccattgtagattcttgagttcaacctaccattcatatatactttgaaacttacacaaattaatgaaacattaaatcgttatgaaaatgacgagaaaagaaaaatgtagcgttgttgaggggacacgttcatgagtgagaccaatgaaaatttgtaatgcgcctaagtaacgtctttatcatccttttccttattttccaaacttagaaaaagcatatgtatttttattatttattgataatgaaactgaatttaacacttgattcatgcatacgtgacgttgacctttacaattttggcaaaccactaaaccccaacgaggcaacgactatttcattgacaatgttttttaaaaaaggaaaaaaaaaacattcattgacaacttttcgttacaatcgtttatattattttttttgctaaaaataaaaatattttaataaacaaaaaagtttaactttacaatcgatgatattataaacttacaaagatggtcacaaaaaaaaaaaaaatgaaagcataaaaattaactaaaaagtttcggtccaactactcgatcaaagcggtaaaacaaaaaaaattgatacagcgatgacgattacgattgttctttccgaatttctttgctagagaggaagtgtaaatgcaaagaaggagccgaactgagaaagagtgataacactagaagcctttcattggatatccgagactaggccgtcaacggtagagaactcaaagacctcgatcacatttgatagttaaaacggtaatggtaacaaaaggtgcatggaatttctctccttgacgtacgaagtgaaagatctagttttttttgtccatatcaaacatcctctcattacgtttatattgccttcagatttagaatgagctgatttagatgtcgtagtcccttgttgagtagtcttacttttccagtctgctagacgatttagtctcattcgtaagagattttctaatttctctcttttttttctaaactccacaatacttttattgtagggcgaattgtttagcggtataactcgttcaagatttgttgttgtattttctttttggtacacacttttcctccgtatgtatttaccaatcatcaaggtctatatgtttgtaatattctaaaggatttattacaccatgccaaatatgcaaattgactagtaaattttccttcattatggtgcagattgcaaggcaaaatatatatgttattgtaatgaattatcgtaactatagatcaagcttatgatgttatatatttacacaaatcatctacgtacccgaaaccgaatcattgtttactaatggaaaagtattacatatgtagaagatatatatgcttagaaaaaaagatcgaaagtataaaagagaggaggaaacaaaaaaccacatttctttccaaaaaaaaaccttactcataattccacaaaaagctttctttgagacatgggtccaacagtaccgaatcatctccatacctaaaatcattttcggtagcatctaaccatgggggcatcgacaccagcccctccaacgagtcatacagcgcacaatcgtattttacattgttttcaagactcggcaactccacaatatctcctagctcccccgaaagcatagatgatgaggacgaggacgaagatgaggatgaggatgaggctgaggacgatgaggatgaccacttttcgatcttctcagtatcacacctagtttgcaacggcgttgagtcatcctgaagatggaatggtacagttttgaaatccataagagcggcttcggcggctgcggcctggatatcctgttggctgagcgagactggtcttggcagaaaatccgcgagctcagggaagttaaggattgcggaacttcctttgatactcaatgccgcaacatcatgggcacgcgctgccatctccgccgtggggaaagtcccgagccagattcttgatttcttacggggctcccgaatctccgagacccatttcccccagctcctcatgcgagccccacgatatacccccttttctttcgttttctcctttttcttcttggaggaacattccgtgtcggagccatgagaatccaccattcttttctctctcgttttgatgtcgaagtgctcaaaaaattgtgtaccgaagtgtgcaacaattagttcctaggcaagaaggaatgagacatttttttagtgtcggtgtaatataagaaagtttttgttttatgaactagtcattttatgtttcttctttccgatgacattatatatactatagtactgtctgtgtgggctcgcatacgagaagtagtgtgggggtattgcttacgaattaattatataaagggtgtcaaattccaatgactgtgatttaatatttgacaatagaatttaatctggtgtgaatcccgtctttatagatgtagaaccttcaaatttgaatttctagatattaaaaaaaagaagaaaatttaacgataaaaaaccttaattttttgtttaatccattttaaaacactcgactaaatttacatatagaagataactcaaataatataggttaaaaaattaaacgtaacattaaacggttaaagccataaacgatttctgtatacaataatgcaacattgtttgtgtgatagaaaaatgtggtttcagtcgaaaataaaaaacaagacgttattagtaaaccatcaagaagtgtgatttcctgtaaacattcgaaacttcgaacgtagaaaaattctcaaagtacagaaatgaaacaagtttggctgatcagacatcaacgaaggaaacatgtatgtttcagactgcacgcgccaaattacataagttcgtcggccacctacacaccaccaaaaccggccctaaattttagacgaatagaagcgagagaagaaaatttcccgtttaaaacattctcataatatgtatatttttttaacttcacaaattctcaaaaatgaaaaagtggtaaacagaaagttttattctcaataattggaattaatagattaaggttccaacttaaaagagatacatcttagaggacagaaagaaacaatttttgggatcaataatacattattgaaacgatttttggggatcaataatacattaatgattagctaatagggtatgtgacgtgcatagcacagtttcaaacacatttaattcaacaatggttgctcgtcgtcagcgactgggacatgtggacggtcaatgaggacattctcgtagatgaaaccggcgagtccaccaccgatcaacggtccaacccaatatacccaatggtcagtccagtttccagagaccaaagcgggaccaaaagaccgggcggggttcatggaggcgccagaaaaggcacctcctgcaaggatgttggctccaacgacaaatcctgtgagaagtgggccgaacccatcaagggatcctttcttcggatccacaatagtggcgtagacagtgaagagaagtgaaaatgttaagatgatctcccatatgatcccttgcgtgtaactcactccacttgccaatgtgtgaaccggagttccctaatcacaaaacataattgtaaaatgtcaaactacgtgttatatcgaacaggcaggaatcaaatcattgtttgaagtgtatgtaattaaaagttttaccaattcgattagaaaaaaaattattgtagattaatcaataaataaaaaaatctgtactagtacataatagaacttgtgtattattgaatcagaaaaaattatatacgaaacaaaaaaaatgtaggtaagcaattgatagttgacttaattattgaaccaatagaatcatgtgaaaatgtgtgtcattggatcataatttataattccgtccttggcattacttttagtagcgttataagttgttgattagcaataatatgtttttttgtaatattaaattagatttttgtaccattcctccggtgaggtaactgaggaggaagcatgctgcggaggaggccaacaattgatcaatccaataaaggaatgcacggaatacgctgatgtggccacccaagagtagaccgagggtgacggcggggttgaggtggccaccggagatatggcccgcagatatcattaccgccacaacgaatgcatgagccaccgcgaccgcgaaaagtcccaccaatgtgtttccgactaaactgtctaagaaaatgaataaaataaaattaagttgtaaattgaagtgcatcgtagtgtcaagaaccaagttaagctacttggtttgctagaaatagaagcctgagaaattaccagtggccatggcagatccaacaccagcgaagacaaagagaaaggtagtgatgaattcgacaatgagggctttaatgcagtccggtttagccgcttcgctatggtgccctaactcgatcttcttcatggcttttgaatgaatttaaaagttctaatctaacgaaattttgatatatggtttagttgatgttgtgatttgtgcgtaatacaacgaagctacttataatgagtttttttttttaattgtaaggaaaagaaagtgaaaagaaaatggtaaggactaaggagcacatggaatgaaattaatgtatgatgatgagtgattgatttgagtttcgaaagttgacttgtattatgttctttagtgagttctgagatgtattactttatttgacatattgtttttggagattgggtaacaaatttgaaatatgcttacacagtacagtactctgatttgtgtccttcaatatcaaagaggtgttactggttggatacgtttaaattgtttccattggatataaagtagttcagattgttaaaaactaatttatttgtaatgatttgttattcattttcattttataatccactgcataagaatgatcatagtctcttacaatccaatccaatgtaacaacgatcaagaaaaatcattaatcaatagaggatgatgaattaacaaacgtaaatagaagaaaatcaagtagttgcataagagaaaatttaataggaatttttggactgcaaagaaggaaaacagatcaaggtatatgtatgtgatctttatcaaagaacttgtgttatgggatatatggtgaggcgatgaaagctttaacaatgtggagccatgttcgactccaaaggacaatcaaagcacatataagtgcaaaattgcttataaatgcaatcacgtaagttgacacgatactaatataaaaattagaacatcaacatgtcataagcaaattgtccattttcgaccatggattatgtgataaattggtcaaataatgggttagtaaaaaatttaacactttacgtaagaaaagttttactaattatcgaaaacatcttgacgactttatgaccattctaaaataactacaaacacttataatgtcagatatctatatatatatatatatatatattttactaaccattttttgattaaaacttgaattcgtcgtcaatttgttttgaccatttatctactcattatatgagtccaaaaaatttcaccaattactgatcatttcatatattcgtcttagtttgttcgaaagtttttcaataaaaagtttgaccattttgttggtaagaaaattggtcaaaatttgacattgtatatagcagctccatcggcttcttctccttctccattacctgattcctctgagttcttcctaccctcacaacttttgttggttaactacaagaaaacgtagatagacattttttggtccatttgcaaagtctcgatatatggaagaaaaatacttccatgctgtacccaaagtatgtgaaatctctcatgtgaatgcatgttctgcatgccgtcgtctcataccgccgttgtcctctcagactaatactattgcttcaatctatcaaataaaggcaaataccatatatgcttatatgttatcttacatagccacaatctccacaatcttagtattcactagttactataaaatcttgatgctgaaaaattcgtacattaccttcatgaatatgtgtaaaatggcctctttttttgtcgtttgtagccttgtaaaacataggaacggctctgcatttagacatgcagaatggacgagttattaaaaatcaacgaaactaaacaaaaaaaacaatgtcaatttttgtttaacctaaactaaaccgaatctaattttaaccgataatacctcttgatagacttttactaatcaattaaccttccttgtcttctaccttgatttggggaaagtgttgtcctagattcatgtagatcatcagtacatagaagaaagttacttgtaacataatctgaccaaacaaaactaaccacttaaatatcctaaatctctctttctaagcctatctaaatactttgaatttgtatcatcgtttgaaacaatttaatatagaaaagaaaaagtaaacaaatactagtatgtatttatttatatgtggtccaatttgcccacagaaaaaggatcatgagacataagcgtgagaccgtctccaagctgttcgtctctgatgctccagctccctttcccactttatttttatgttattttaagtttgaactacaatcaacttacatatatacccaaaaaatattaattactgtatacctattttcggatatttcatctattattgcatatattttgtcacaaattttgttttggctattttgtgtagatttgagtatatatagttatacaattataattttctaatattttggtttttttttttttgttacatgaagatacatttggattaaaaaaagtaaggaatatgaaccacatctaaattttgtttgtccatgagaccatcctcaacgtaaacactagaattgtcccaaacccaaaaaattgaaccaaccaaataaaagaaaattataatagccgaatgagacctaaatctctaaaaccaaaaacctcgtaattggaatagaaccgatctaaacttaaacgaatatccaatacgaaataaaaagccactatttaatagcaataaatcataaattcttttctttttttgtaaatcataaattcttacgtctatttttttacttattagttacctaattcactcattagcttgacttaatcgataattatatttatagatacagtatatggtaaacatcaaataactaacgcttattgaaaatttcctttaaaatgactaatgagacgaaaaaatcaaataattaaacaaaattacaaaactgccatttcttcttaaattatttcaagtaataactgtactaaaagctgtttttgttctttctctctctctctctctttcgctgctctcacacgcaaataatggctcatctcttcagggagctgtctctgggccactccaagagagagtctacgccgccgccgccgtcacattcggcgacttcacgttcttcttcaatgtcttccgatctacctccatcaccactcggacaactcgctgtccaactttccgattccgatctccgtctcactgcttacgagatcttcgtcgccgcatgtcgtagcgccaccggtaaacctctctcatcggctgtttcagtcgctgttttgaatcaggattctcccaatggctctcctgcttcgccggcgattcagcgttctctgacctcaaccgccgctagtaaaatgaagaaagctttggggttaaggtcgtcttcttcgctttcacctggatctaataagagttctggttctgcttcgggttctaatggtaagtcgaaacgtcctactactgtcggtgagcttatgcggatccaaatgcgagtatcggaggctgtcgattctcgtgttcgtagagcttttcttagaatcgctgcttcacaggttagctcaactttgctattgcatttccttctcgctggatctatgtgatcctattgagcttaatttggtcaatgtttagaagaaatctagagcttgagtttagttcaaaacatgttcaatttcatcatcttgtgatataaatgttgccattgacttatctgggatagatcttaaattgcttaaattgggaactattgtggataagaatgtgtgttgtgacatttgtgtcttagtaataactgctagagggtccagtgctgtggaagtttttggctttaattaagttaatgagtttttgtttttgtgtttgttcttcaggttggaaggaagattgagtcagtagttcttcctttagagttgttacagcagctaaagtcttctgattttacggatcagcaagaatatgatgcttggctgaagagatcattgaaggttcttgaggcaggtcttttgttgcatcctcgtgtacctcttgataagacgaatagttctcaacgactgcgacagattattcatggtgctttagatcggcctttggagactggaaggaataatgagcaaatgcaaagtcttagatcagcggtcatgtctcttgcaactagatctgatgggtctttctctgattcttgtcactgggctgatggatctccgtttaatctcaggctttatgaattgcttttagaagcgtgttttgattctaatgatgcgacgtccatggttgaggaagttgacgacctaatggaacatataaagaagacgtgggtaattcttggaatcaatcaaatgctgcataacctctgttttacgtggcttttgtttagtcgttatgttgttactggacaagttgagatggacctgcttcatgcttgtgattctcaactggcagaagttgctaaagatgcaaagacaacaaaggatcctgaatactcccaggttttaagttctacactgagtgctatattaggatgggcagagaaaaggctccttgcataccatgacacttttgaccgaggaaatattcataccatggagggaattgtttctttgggtgtatcagctgccaggatattagttgaagatatatctaacgagtaccgtagaagaaggaaaggagaagttgatgtagctcgtaccaggattgagacgtacatcaggtcctcactacgaacttcttttgcgcaggcaagtatttgcattgtcgtggaggatgttcactatcgttttatttctatatttacagctgttccagcaattttcttgaacttatttctttgtgtttcgtttttctgtagagaatggagaaagcagattcaagccggagagcatctaggaaccagaaaaatcctcttcctgttctagccatccttgctaaggacattggtgagctagctattcaggaaaagcggatgttcagtccaatattgaagagatggcatccgtttgctgcaggggttgctgtggcgacccttcatgtttgttacggaaatgagattaaacagtttatagccggaatatctgaattgacacctgatgctgtccagatactaagagctgcagataagctagaaaaggatctggtgcaaatcgcagtagaggattctgttgacagtgatgatggtggcaaagcaattatccgtgaaatgcctcccttcgaagctgagaccgtaattgctaatttggtcaaagactggataaaggcaagaatagacagacttaaggaatgggttgacaggaatttgcagcaagaggttagtaactatatcccaaatttctgtcttagaatcttcaacttttgccatatttgggaaacatagtcattaagttaacgcgcttttgttgtctaggtttggaaacccctggagaacctagaaggaggatatgcacagtctgctgccgaagtgttgcggattactgatgaaactttggaagctttttttcagcttcccatacctatgcatcctgctgtattacctgatttaattattggtttagacaaatatcttcagtattatgtctcaaaggcgaaatctggctgcggtaagtttgcacatgattttggatttatattttctatatggtggaagaagtcttaaactattaattcctcacattttacatatttttatatgatgatgctcaggctctcggactacgtacatgcctacaatgcctgcactcaccagatgtacaacgggatcaaaattccaatggaagaagaaagaaaagacacctaccactcagaagagagaatctcaggtttcggttatgaacggtgagaattcttttggggtcacgcaaatatgtgtcagaataaacagcttgcacaaaatccgcagtgagcttgatgttgtggaaaaaagagtgatcacacatttgaggaactgtgagtcagctcacaccgatgacttttccaacggcttagaaaaaaagtttgagctcacaccagcggcttgcatagaaggcgttcaacagctttctgagtctctggcttataaggtcgtcttccacgacctaagccacacgttatgggacgggttatacatcggagacctctcttcctctagaatcgatcctttcctcaaggaactcgaacagaatttgacagtcatagcagagacagtacatgaaagagttcgaacacgcatcatcaccgatattatgagagcctctttagatggcttcttacttgtcctgcttgccggaggaccctctagggcgttcacaagacaagactctcagataatggaagaagatttcaaatcaatgaaagatatgttctgggctaacggagacggtctagccatggacctgatcgataaattctcaaccactgtcagaggcgtgcttcctctgttcagtacagatacagacagtttaatagagaggttcaagggaacgaccctcgaagcatatggttcttcagctaagtcgaggcttccgttgcctccaacatcaggccagtggaatggcatggagccaaacacactcttacgtgttttgtgttaccgtaacgacgaatctgccacgaggtttctcaagaagacatataatctacctaagaagctttagtaaacttacggctactactgcaacgtataataacctcacaagatgaagagtgtgtgttccacttgcaggagggagcctccgagatttgtatagtgagtttcattttttttgttttatggtttttttttctaatacattcctatacgtactatataattcatttatatcttttgttattattatttttgaagtatacaaataacttattcgatgtagcttcgattgtttatttcttcagctgtgttagttaccaaattaaaaagtaaggaaatatacacatccatttgccgaataaaggatgtgaaaaaaacacatgattgatatgcaattttgaaatcaaaactggaccaagctaactttgacaaaaaaaaaaaaaaaaaaaaaaaaaaactggaccaagctatagaggaaaaaggaaacaaaaggaacatttttgaccggaaaggaagtaaggtccaaagggctttttgcatggtctccaagaacgagtattattttggtatcttcgagacttttgacattagaacatgctcacttagctgttacgtccctttctacatttatccatagttttacataattgtttaatctcaaagcaaatcaacatttttgacagaacaaaaagcaaatgaaacacaactagcatggaatataaactttatgccaaaggctgatttctgttgtcgattcgtggaataagggtgtttccgatgcgttatcgatactttttgccaacaatatatatcataatatgttttctcggaacattttttgggggtaaaatgttaaattgtatctcatttttgagatttgtttttacagaatacagaatacaacgaagagatacaggtgactgaaatctacaaaacaaacaatatattatgaaagaaggtctaaaagggaaaataaaatcaatggaaggagtgcgctttgacagaagaagacacgaataagccatcagtagtatctttgtgtcttattgacgttcatttatataaaaaaaaacttttatctgaaattaattatctgtaagcgacattattttgtagtgaaggaatagtagtttgttttcaactagtagttattattttgataaataaaaagtatattggccagtcaatattaatttctaatatatagaaacataattacaaatggatacctctaaaagtttgcagaaagcatatgaacaaaatctctcctatgatgcaaaagagaaaagaaaaggttttcgatcttctcatttctatcattatattgcaagaaaaaagaatttatatatagacaaacatgcacatacaaaacataaaataaattgtggaaagtagataataagaagagaatacaaggaacaatgatgacaaacttaaaaaccaaagtgggtgcaagtgttgagtccttttcttattggctattcgttttgttcctcaatatcttttgaccacattgtcgaaatttcatgttattaagtacaattttattaaagttatctactcgatcctcccatttagttatctcttgtaattattttatcattatttcttagttgattcataaagatgaagaggacagtagtgccaacttattacttattctttaacgggttggtctaccataatggattaaaggattatggaaacaaaaatggcttagacccgaaccgagacaaaccaggttgccttttctcgaagccagaatcggaccagtaccggcctatgtagtgaacttgttacttgtaccatcccgatcaatttgaagtgaagtaactaacagacacttcatcgctacatgtcacttgtgaaatgaatatagacgctacattgcataatcattgctagtctagtcacattttagaacaaattcgtcaacccggtccacggaagaaaaacatgcatagaagatgttcaaaccattcttcacattatatattatatatacattcatcagtaaacaatcaagcataaacaaaaccatcttgatagacaatatattaatttgggttattaaacctaacaaaaaaagacaaagaaaatgagattttaaaacaaaaataagaacccaaataaaattacatatatataatggggtcaaacgaagccagaattgtcaggccaacgatagtatctttgacaaataagtagtgcaagaagaacttgacgatgaggtagactctaatgcttgtaacacgttattggtgcatggcctctcttgcggatcaatggccgtacatttcaaagccaagttcataacatggacaatctcgcgctgatgcactgatgtgtcaatggatgagtcgatccacgtgtcgatatggcaattcgaatacgaatatctagcccacttgaccaaacttccgttaactccagattcgatgtcctcattactggaggaacatttaccggtgaggagatgaaggaggaggattccaaaaccatagatgtcacttttacttgtcatctccttgtgctctctcgtttctacgttacaaaacgaagaactagcattagaggaaaatagaaacacaaataaaatccatttaacatgtaacatgaaaacaaaaacattttaagacatccattttttctagattaattagtggtggacacgcaaacgggaaccaaagttaagatcatcaattagaagccggatccgaattttgtgcaattaaactgaatcaaccaaaattgtattgaaaatttgatcttttagcaatgtatatagaaaaggtacattgagttatactgaaaatctataatattacataacttcttaatatttttatacaaattatttatccaaatctcaatggaagcaggaaaaaaaaaatcaagatcaaactgaattaatttttggatcgattttagagtatattttccaaaacgtgaaaaccgatttgtttttaacatgggttgtaatatttgcatggaaagccattattctaagttgaataattgaatttggtctttttgttttgacacagagatgtaaattatacctggggccatgtaagcagcatccatgcaaagtaagcccggaagaccgagacaaagccttggttcatcggtgacgtcgatgacaatattctccggcgataaattaccggcaacaacagctggagaacaccggcaatgtaaaaaccgaagagcttcgacgattcccttcataatcttcctccgtctctcccaactcaaaccacttaaaacctggctcagccgtttcccttcgacgtcctcatgtatcaagtacgccacagtctccgaccggcacgtagcaactatcttaagaatgtttttgtggtcagaaagtttcctcatatcggatatcatctcgggaagagaatcatacttcttgacctccttaacaacgaaatgcacgccgtttttatccacaagaacgttttggtccttaagagacgatagaattgtgttcaccgtaaacgatttcatgaattttgaatcgaagaattgagtttcccactttgtaccatcttcttgttccactttcttgacctccaaaacgttatgcgttctttgaaagacgagaacgataaagaaaccagagactaggacagccaagaaagctgcaaaggttgaagtgatgattaaccaccaactcttcgtacttctctttcttacaaccttgcaaggacgtaaaccgctagcggaattttcgctacaaagatcgatgttaccctcaactgctgttgcgtttatggcaagaaaagctccggtgaaaggtaagcttccgtgaagaagattatgagagatgttgacttgaacaagagactcaatgtttcctagattcttcggaatctcgcctgataattggttgcatgacaaatcaagatcgctgagaacttggaattctgcgaaactcgaagggatctctccggtaaaattgttgtggctcaagtcaagattcactagatttttgcaagaagacaactcccttgggatcactccagtgatttcgttctcacttaaatccaaatccattatttccggaaacgtcatgagcccttgtggaaccactccagagattttgttccgtgataaatcgagcttcttgagtcttttgcttctagaaaaatccggtaattcaccgaagaatttgttcacactgaggtctaacatctcaagttgtggcatgtcccatgtgttgatgttaccttggaggttgttgttggataagtccaaaaagttaacgagttgcaacttggtgaaacctcgaggtaacttgcctgaaaagccattgttttgaagcctcacgcgttctaagctctgacacatgcccaaactcggtgggatttggctgtctagagagttagagaagaggatgagcttagtgagatggccagaatcacaaagagtgtcagggagttttccggtgagattgttggtagaaagatcaagaacagtgagattgttatgtttcccaagatttgccggaattccaccggaaaatctgtttgaccaaagctgaagaacttttagacgtggcaaagaagttactccttctggaatttttcctgttaagttattagagaagagatggagaatctccaagctttgcatctgagccacgagctcagggatctctcccgagagcgagttatcgctaaagtcgagagaaattaggttttggagggagaagatggacggtgggatctgaccggagagcttgttttgatagagaaacatatactcaagcttcttcaagtcacctagtgaaggaggtatcggtccagagagattgttgtagacgagatcaaggtggttaagagaggataacccaccgatttggtaagggatttctcctgagagattgttgtatcccaagtatatccatttcaagtttttcatcttccctaattccaccggtacacctccggttaactggtttgaagccaatgttaagaactctaatcttgagaggtttccaagatagcccggtacatggccggttaagacatttccaccgagatcaaggactctaaggttagagaaaaccccgatgtcgttgtagatttcaccggtgaacatgttgttggaaagatctaacgtgtagaggttcggaagaaagcctcgagggatggagccggaaaagttgttgttgcttaagttgaggtaacggagagaaggagacgaagtggtaaagatatcgtgaggtattggaccggacaagttgttgtttgagaggttgatagtttgaagaaaaggtaggcgaaaagtagcggcggtgaggatttgaccggacatgttcttgccggagagatcgagagagacaacacgagagatgttgttgcaaacgacgccactccaaagacacacatcattggttgaagagtaagaccaagaggagaggtgttttagagggtcttgaattgaggatttgaatgataagagaagctcgagttcatttgcatggaggcaggagaagttaagaaacaagaagaataatgtggtgatgagataaggagggtgatgatgatgatgagaagtagacatgtttgcttttgtttctttggctttgctctattattacatgaggttatttgatatgtatatatatgctcttgtgttgaatgtgttgctcttaaggactgtgatttgctttgaaccttagctgtaaaacagaagaaagaaaaaaattaaagggggatcaatgatgacctttgattagaaagattataatagtcttctttgtcttttttttttttttttcaaattagacttttaatttttttttccttcatgtataaaatcttagagagtttcataagaaaggcagtgtgcactattctttgtactagatggaaaagggataaaaagtgctaggatgggctacaaaaaggggaatattaccaaagtttaaattttaaaatagaaagaaacaaaaaaggtgtcgagcactttggcaccttaaattatggctgatttatttaatatagatattattcagtaaaaatataaagaaaaataatattgaattaagcatttgttaaacaaaaatcgttctttagattatgaactagaacaaaaactaatttgtttaccctcaaaacacaaagtaagaatgttgtttacgttgttatataattttctcttttccgaattgaattagttgaatcaccggctggtactcctactctatcacaacttagtgttacttcaacagtaaaaactaaaaccaaattttagaaagaaaaaaaaaacactttgtggcttattaatttgttttaggttaattgtattcaacttagtgcatgttagagtaaatttaatattaagacctaatttaggaaaaaagaaacattctgtggcttattaatttgttttaggataattatattcgacatcgtattttattttttgtacgttaaaaacgctaataaaattttatattagagagctaagaaatcttaaaaatagcatgcttaaaaacacttgcatcataaattagttgttatgggaagctaatcagattataattgttatggtaagaactaatgcgagtaatcatagaaatatcactgttacttttctttctcaatcacttttgtaatcggacatttgaacacggacagatgaggatgggattgatgtcgtcaaaaagcctctgagatgtttgtcggcttactatcgaaatgttcttttgactgaagaaaatcaaaacactttttcttgtgactaaacatcttatgtgaacgttgaaaagcattttcccactctacgcacttaatcatttttttgtacttaaatctttcctagttaatttgaccttctctatagtatttctgttatttttaagtataaatttatataaatagaaattcaaatcctggctacaaaacaatttgtacgaatataaatatatgtacgtaaaaatgtgataacctatgtcaatcactgtattatagagtaattcatgtagattcacttcgagtccaattctttgtttaaattcatgttgtacttaaatttaattttgcactatataagtctcaaatttagaactttattgataaatcattccttattaaccattgtttttaaatacaatgtttgcaatggtcttaggctacaacattgtgctatattcggtgactacctatcctcattgtccttctttattgaatctttggtctcgctcactagccgtcttaataattaaacaggattctgatctattaagcttagtgagtataataatctcgtctacctaggtaaatacataatcaattcatgtctaatttattcaattagctctcatactactatatattttccacttgataaaaaaataaccacttggttcttgtctaatcagcttggcttaaataacctaagcttagaccaaatattagcatagactaagtcatgctatatatcaatcccaatcatgtttcacctactttacataaactatgtcttcacacataaacttgatgagttaattccaatttatgtggtatatgtagtggtctgtggtctaacccatatgtctttttttaaacgacttatctacgtagttaccttatctctcatcaagcttaaccaaatcatctttcttaaacatagagcgtcctaatgttttctattaacatatattatgttttctgaacatatataactgtttaacgagtcatcttacatttaaaccccaacgttatatagtttagtttcactggtatagctcttgttttgatgatatatatataaaacaagagcatttctaaccaaattccaatggattttaattgcttttatttctgatgagaaaactatgagtgtaccacccggaaggtaagaaaataaacgttttgagttatcgtatcgaaattgtatagtttatgaatagagttgtaccaccaaaacgcacatcgagaactaattgcaaaggaaaaatgggtccataaaacaaaaagaatgaattttatggagagaatatacagagagtggtcattgtcatggaagggcatgctttgcttaattccattttctagggttttgcaattcccccacacgcccactttctcccaccccacgcttgttctcttccttttgttttcttcccttaatttaatgaaataattccaacttcctccctaaatagactgataaactaagaatatccatataagggtaacatatatcccttatcatataaataggcaatttcatgtagagaaaagaacaactccataaacatgtgataacataagctaaagcatataagaaccagtcctcgaaagaatacaaaagatatatggaattttttttatgtaagatcatgaaccttgaataatttgttttctccaaagctacaccaaagaaagcaaaaaaaaaactaactgaggcttaaaaatatttatgggtctcagtccaagacctccaaattaaattagttttaaatgaagaccagaacggttataaatgggatcagaaccatttggaaaaactgttggcttcatattttttttacgtttctagaaccctaagaacaatttcaaagtgatgagactttgatctaatcgttcgaacaccaataaacacaagacacaacgattcttgctaatgacgagtggtgaggaacgagtgacgttgagccgacccgtttcctttggagaaggtgtctctttcttttttacacactgattgtaggtctaattgtgttgttaacaagtggtccaaattaaagtagtcactaccgattactttatcacattaaattagtgagtgagagactaaatcttattttatgacattgattagagagaaagagtatcgatacttaattgtgttgcttcttttgttttcattttaattactttttaacagtactggtataatgtcggccttgaatgggccacaaagattttgacatgttcgttttatataagatttgccaattgaaatactggagacgggaattaagagaatggctacaaacatttgcaaatggctagctacattaattagtggttggtaattggtcagtaatttttgactgaaatcgtaatctacaaattttctgcaaattaattcggttagccctgtggatatacggatccgaaccttctaatcattaaaaaatctacatatacatttttgtagtcattttaacaaataaatcatagagttagacttattttacaacccaataccattagcattaaatcttttttccaaaataattaattttactttaaattcttaatttaaattgttaatcacattatcaatcaaatttaatccaaacaaacttcacatcaaactcttaaaattagcataaacgtatttgttaacaatattttaaaacaaaattttttgtttaaataaatattatttttactaaacattttttgtttaaataaataaatcttgtatttaaacttatttacaatgtcatgctaccgtattaattatttaggaatgaaaatatttaattaacgatttaaatcttctaagtcctcgcttttagagttattatgtcattacctaaaaggcaaaaaatattatttttttaaatattattatttatatatttaaacttataaaaagtttaatatatcaaataatttaacatcattatataatatatagagtttaaaaaatctcaaaaaaaattccgtcatattttgtgattcgaaattttaaaaatgaacatatattaaccaattggcgaaaaatgcgtgggttcaccatcccgcatcgattaaatatttagataatgattcataaaaatatcataaataagatcaacattaataaaataaattattttttttggcaggacgagttttgcgggacgggtttggcagaacgttacttaataacagttgtaaactataaaataaaaatattttataaatagatacaatttgcaaatttttatatatactaactttaaaaaataaattattcccgcggtgtaccgcgggttaaaatctagtaatatacacaacctcaacaattttagatgtataagaaactagcaaaatctaatttgagtatatcaaagtgatgtaatatttgcaaaaacataaaattgtagtaaaattgatgatttagaaaaatagatatatcataatatattttttctttgtttattaataaataacaatatacactataactttttttttgttatttaagaataactagaacaattacaataacaataactacagcttgggtctacatcattattgctcaagtctcgagccttggatcacaactgattgttcgagcaattttggatcctatcgaaaagtctgacatcatcctgttctgactgcttcgtttagcgatctctctcatcgatcttgtgaagtcgagtttagggttcacccttgtagtagaattgaaggcatcacaaattcctttgtgccagtcaaaggcttcttgtatcccagcggctattggaggatctttccgaagtctctcagttactacttcgccacaaagaccacaaacccaattgcctgaatacaagtttctgactttggctatgtattgcatagtacattcttcttctataccacaacaatcacatttcacttggttcacttctacctctccttcttgttcttgctcgtcgttttggcttatatttcgttttctctccaaggaaacatcagagaaggcctttcgaagaatattccctttattctggtcatatgaagatgaggttttattttaagagctataacaccaatgaattgatagagtgctaacgtatagtatttataaagatataatttttgtcaagtgtattgagttaaccaaatgatactgataatcatatagtacatactacatagagatagagttcagttaaacttaagaacaaactaattcatataatttgatgaaacgcaatgtgttgtaactaaactaatcaaagtatttaagattatataagtatgtatgttaactaaatatttcaatatttgtatacataccattgttttggttggccttgcaaagactgcgtatcttctcgttgttcttcaataatgcatgagattcatatactttggagttcatatttaatcgtatatgtatatatatatatataagattacatgcacacgtgatacgttcatagttgcatagtaggagtgtgagtcatgcccaacaaggtcactttacagcgagttgaagagttttgttctactttttctgtaggcaaaatacgaaagatttttttccactcttttttttttccttaaacatgacttttctcattgagatttaaaatggataagattagttgtaacttgtaatatatatatcaatatttgttatatagataatagatatgtatgttaagggctatctggattggatatgtgatcatataaatgtcatattcattctgcaatgtcaagacctttattatacacatcatgggctggccaatagccaatatatgaaatgagttataatttctagtgcctaccggctaattttcttatcattgtcgtaatttacaagaatagttcactataagtactagatacataaataaaaaatacgccatatgaaaaagaaaaaaaatgacatgtaaattcatcaaaattcgactgtaattaaatttccatcattaaccatatctaatctgattgaagttatattaccaaattaattaatatggtcatttctataaatacttcaaaaacgttttgtaagttgacggcaagcgatgggtcattgacagctactattcaaaaatgaagatcttaatctatatgttgagttcacactatgtataataagagagttttgcaagaacacgtttctaagtcattaaataacttcaaaaaattgcaaataaaaatcaaaagttgttaaaagaagataacgaaattctaggcttgtgaaggattcacgagcgacatggacgaaggtcactttttccgcaatttgcttaacgaaatccaactgaaacctttttttctagttacaacatccttaatcctttatccggttaaaccattagtatctgaaatggagctaatattgtttaagattatatacagttgtgagttgtgtataaattaaaagtacaaaaagtaacaaataagctaaatctcaacttattgagcaatataatcgtaaaattttccaaatcgttcggagagattaattagcaaatcttaacaacttacccttaagcaattcgatctctatataagagagttaaatctttctctcttaagtatcagagaacgagttcttcttagtaacttgaactattgaaaatttatatttgtaagaataattagctaaaatgacatagttattttttttagtatatgttctttcaccaaaatcccacaaattatatgcaaggacgttacattttttttttccaccacaattctattaaggaaccttctattaattcatcaacaattccacaaagagttggtcttgtgcggaagcaagcaaattacatgtttgtagaatgaaagatagtatgtgaagttgtgtgatagaaagtagaaacagtttagttttaaaaaacatacagaacaatttttttatttgtactccaaatatggtcatcttacaaatttgccctaatcataaatgggttttattaaacgcatatttgctattcacttatcaacaatttttctaagaagacgactctcttcttctcaaagcatcttcttccatgttcttggtgattatctctaatgctttctcatacttcttaaccaaattttctaacgacaatcctctcacaggatcaacggtgaaactccactcaatcacacaaccatcttcgccacgtggcaatatcttcaccgtcgaaacgtaggattcgaatccagtgttactctccactatctcgtatctcatcacacgttcaacaggattaacggccacaagcttctcctttgaccatctcgcggcggagtctacaccgttggatcctatggaaaagccggaacagaatctgatgcaaccctgttcaccgttgttgccgtggacgccgtgacatgtggctagcgttggaagccacttgtggagattgaaaaaatcggtgaagagaggccagatttcgtcaggctttgcctttgtgagcgtaactgatactttggctagccatttttctgggcttgaagctttttccatgtcaaagagagagatagagagagcgaggatctagatatatgaaaataagatatagtgtattgtttatatgagtctatgacatctaagtaaaaatatcatatgaaaacaatttggagaatgaaatttgattacctgaaaggttgatgccgatacagtgatcgaagattttaacgctttttttgtttttgatatggatgcgtttggcaagtgttattcttattattatcacttcttgggaatattaaagacagttgtccatgcatggtaaacagcgaaacatgtgttagtgttttttgtatgtacattatgaatttatgataattttttaaagagttttttttatataaataagtgcgaatggtttttggcagttttttctctctctacatactaaagaataactgaaaatttagtagtaaataaaataaaataggcattagttgaactcttttgtaaattatttcttaaacaagtatttattttgaaaacctcttaaattacagttattataaatctattcaagataacgatacaaatattcatggattttatagtttttttggtttttaataatgtaacgatttcaaaaatatcatggttaggagtaatttttagctattagaaatcacctaatcatattttaaattactctaatataccaaaagaaatgtcttcgaagtaaagtaacgatttaaaaaatatcatggttagaaataatttttagctaatagaaatcagctaatcgcaatgcacaataaacaaatttcgtataaatatttttttttgtttagggctgtatacatcaagcaaaacaaagtgtaaatcaatagttgtggtagctagtgttcatttatttgctgaaaccaaggcaaaaccgaccagacctcaataacactcccgagaaggacctggtgagggaaccaaaggaaacaacccaaattttcaaagagagcaaaatccgaactcatcttcttatagaagagggaaacatgtggaaggcattcagagagcctaacttgtagggatctctttatcttactatgttttaagagagtcctcatatgtcaaccagcaaaaggaatattcgtatgcgaggagaagaatgtagatcttacatgtagatgtgtgaattctgatggatcccaattacaggacaatcaatgttgatcaagacaaaaacactttggttctcaaagactttagaacaagttactacaatttttctcttcatattagattcgccacaacagaggatctttaaatacacaagaatataaactaactactaattaaagaacatgaaacatgggaaagaaaacacatttcggcaaactaattaaaataactaaaactcttggccacgtcatcttcttcctcaagttgcatctcatcattctcaagaaggtagaagcaaaatcacttttaatttactagaaagccttagggcaaggttacacacaaggtcacaaacaaagaagcaaaaataagaaagaacgaagacaagcaagttgatcgacgcaagacctaagaagtatttaagactaatcctagattcactacccagatattcacaaagtgagtgaacgtggaaagagaaagtacacgaagccaacgcctgccacaaagtggtgcattgagatagtcttactttgcgagaggagcatggagcccaatcacatgtttcctataagatatttgaatttttttcaacattttaatcatccatgcatacaaatgcgcttaaagagtttactgatggctattgtaaagatttttttagttgctacgttgtaccttgatacaaaagtattacccgtcgtttttggaaacgttccaggataatccatttttatacaatatcttaattggttttatacttaaaccatggaaaaatctcttagtatatcctatgattatgtaacgatgtcaataaaagatgatcatactccctaaagatactcccactgggtcgtgcaaagaaatatagtaactatgcatggccgcatgggtatgtgcatacccacgaatggtgacaaaagtaatggtatgctgaagtcttttatactttattccttttctgtccaaataccttttttatccttacgaagagctgagtgatcttaacagatacttgtgctagtgatatttagacgttggtgtaaacacaagagcagttttatcaacaatgcatttttaccttgagcataatccaatatctttgagcaacatccttaaattaattagcatcatccaatatcaccttgagatttcaatagagcatgttcctaagttacttacatgctctcctatatatcttttatacatacatcttttggataagaaaaaaatagacatacgacattaaatgtagaataacaagcgcaataaaaactcacttatcctttgattataaagttggctgaggacataagcaaaatgtgagacttgactacccttgtgttctcgtatttcgaataatttatctgtttacactcgctacaaaagttatcttttcaaaatagctgtgatttttttgaaattgatacactgacttgaaacattaccaaatgacaaatatctatcacttcaaagaaatccttgcatttattataagatactctccataaaaagagattgtcatctgcaaaattggtaggttagtccgaaatattttgaaaacatgttaaattattattttctcctatataaagatagttcaacccattctttagatgtttcatgttcacatctttccacgtattgcagattttttaagtttgatttgttcttctcaaaacatagttatgaatatatagtttatgatgcactattgtgacctcatcacatgatgcaaattgaacatctcttccaaacacaaatcgatgattaacattccaatggatgtgttcagcaaaagctttcctaatggtcaacccataaacaagatcatggtgaggaaatctagacgaacactcgaaccccaacattttgtcgtgatcattcatagccgagaagagatcatattccgagtcaaactttgaaaatttgacatttctcttttacaaaaaaaaaaaaaaaaaaagaagacaaaataactaaatggatcatttgcaaaaataaccatatttgataaactatttaagtatatagcactatatatgtataaattaaaaaactaacatagagggcaagtataatgaccaaatgtggtggtggtgatcaaaagtgatggtggtagtgactagtgaccaaagatggtgatgatggtggttattgtcacggtgctggtgggagtggcaaaaggttgtggtgctgatgggagagattaaaggtggtggtgatggtgatgatgattaaaggtgatggtggtgagtggtgacggactgtggtgtgatggtggcggcagtgacggtggctgtaatgacggcggcagtggtggtgatgactgtgacggctatggtggtggtgacggcgacagccgtggtggtggtgacggcggcgacggtagcccgtggtggtggccgtgttatgatttggtggtggttgatggtgataatgatgaggacaaaattgtaaataatatatattacacacaaaatataatgaaagttttttttttaggttagtttcttaatttataaatttttgttggttatacacccatatttccctaactaaatactcttttaaaccggcgatttaccattctattgatgaatcgattcacgtcaaattttgaataaattctacccaaatcttcttcaatattgaacctggttttgaaaatttaacatttctcctttacaagataatgaaagaaagccaagatatatcatttctctttttaaccgaccaacattcacatcgggcttttggaaagccttaagaaagaaaaacattccaacaagaaacttgtttacaagcccccttcaagtcacacagagttggtccattaacaattttaagtattgtagatttgattaatctatgttaatcatgtccaatgtccatattgttagataaaagaaagaaaaaaaatcattaaaaacccatagattgtgtgaagaaaccaaaaaaaaaacatcccataaataagaagatcccttaacagaaggttaaaaaaaaaagatcagagtcctttggattcttcaattgcttagtctcataaatccccaaaatctctccacccagttggatttgcagctctctcagattcatcagtttcttgatctctttgttatattcaatttcacgaagattgtatccagagcagatgggtctggaagcttctttctttctcagtgatttcgatcgttccatggaccagacgtacgatgcctgagctgcgtagcaacgcacgcagagatcgggataagaagaacccgaagcagaacccaattgctttgaaacaatcacctgttaggagaaatccgaggcggcagctgaagaagaaagtggtggtgaaggaagcgatcgttgcagctgaaaagacgacgcctttggtgaaagaggaagaagaacagattagggtttcgagtgaagataagaagatggatgagaacgacagtggtggtcaagcagctccagtgcctgatgatgaaggaaacgctcctccacttcctgaaaaggtgtcaactttattgttggttttgttgtttttatgaggttttagttcatcggaattgtctcttgcattgtgtgttgtgttttttgattaggagaaagctctcaaacttaggcatgccacttaaagttaaaactttctcttgtaggatgatttgattattgactccttggtttttacaggttcaggttggtaattcacccatgtacaagttagatagaaagctaggcaaaggtggttttggacaagtttatgttggtcgaaagatgggcacgagtacttctaatgctagatttggcccgggagctttggaggtatgctgtttgtgtttgcaagtttacttgctttcttttggttttctgtgatctgtaatgtgattttgatgtgtccacttttgtaggtggctttgaagtttgagcatagaaccagcaaaggatgtaactatgggccaccgtatgagtggcaagtttacaagtgagcgttatggtctcttgtctttggctctaggattcatcttctgcttgttcaaatagtttgtttataaaaggatgagataactaatgatgctttatcatctgttcgtccagtgcacttggtggcagtcatggtgtgccacgagttcattttaagggtcggcagggcgatttttacgtgatggtatgtggaatttagtcaggtctgaacaagagcacttgcagtatgagtaattactgtttttaatctttcatacaggttatggatatccttgggcctagcttatgggatgtttggaatagtaccacccaggcgtaaacattcactctgagaaacatttactttattttgtagcatctgaagattttgttatatgaaccattgataaacataatttttcctgagatgagcccttcaatattggtggcactcaccatatgatttgtgtgttttatacattccaggatgtcaacagagatggttgcatgcattgcaattgaggcaatatccatattagaaaagatgcattctagagggtaattttctaatatttctgctactgtaactctctttcttcaagtggtttttatttgctaagaagcagtgctcctgtttctacagatatgtgcatggcgatgtaaaaccagagaattttctgcttgggcctcctggaactcctgaagagaaaaaacttttccttgtagacctcggcttaggtacactttatttttgttataagagtgagcgtactttattgtctttctgctgcttatccaatctgttgatcttgcagcatccaaatggcgagatactgcaactggactacatgttgaatatgaccagcgtcctgatgtttttaggtaagttgattcagctaggcataaagcctgtgagattgattcttatcagggacttcaactttagggtacttattaacgtgttggctttttcattttcagaggaacagtacgttatgctagtgtacatgctcatcttggcagaacttgcagtcggagggatgacctggaatctcttgcttacactcttgttttccttcttcgaggccggcttccatggcaagggtaccaggttggggacactaaagttatttgttttatttcctggcaactttccttgtcaatcattaacttggtctatttgttagggagagaacaaaggtttccttgtttgcaagaagaagatggccacttccccagaaactctttgctgcttctgtccccaaccttttcgtcagtttgtcgagtatgtggtcaatttgaagtttgatgaggagcctgattatgctaaatatgtctccctttttgatggaatagtcggcccaaacccagacattaggccaataaatactgagggtgcacagaaggtgatttggtgatcttctttatgaaacatatattgaggtttactatttagctccggtctgaatgtctaaagttttttcgtgtttgtctggtgtgaagctcatacatcaagtgggtcaaaagagggggaggctgacaatggacgaggaggatgaacaaccaacaaagaagatcagattgggcatgccagcaacacaatggatcagcatttacagtgctcacagaccaatgaaacaacggtgacatcttggatcatacttgagaattcttcggctgtacgttgatgaccatgcagctgacatgtcttttatctttgtgcagatatcattataatgttactgatacaaggcttgcacaacacattgaaaaaggaaatgaggatgggttatttatcagcagtgtggcttcttgcacggatctctgggctttgatcatggatgcaggaagtggctttacggatcaagtttaccagttatcaccaagctttctccacaaggtagcttcatttaatattctggggtagtcatttgtcatgtctgcactgctgctatcacttccattttatgatattctccaacttgtgtattttaccattatttttcatctcataggaatggattatggaacaatgggaaaagaattactatattacagcagtggcaggagcaaatagtgggaactcattcgtggttatgtcaaaaggtattcttgttttactccttttgaatgcaggtgtaacagttatttccgttttatctctgtttcacagttttcatcatttgtattcagggacccagtatttacaacaatcctacaaagtcagtgattcttttcccttcaagtggataaataaaaagtggagggaagggttttatgttacatcaatggcaactgctggaagcaaatggggaattgtaatgtctcgtggggcttctttttctgatcaggtctgtgaagtttatatattgtttgggtctagacttaaagagaagcatgaatcacattgaattacatcattgataatatgtttttttttttttgtgattcaggttatagaactagattttctataccctagtgaaggtatacatcgtcgatgggaaaatggctacagaattacatcagttgctgcaacttgggatcaggctgcctttgttcttagtgtgccaagaaggaagcttaccgatgagacacaggagactcttagaacctctgcttttcctagtaatcatgtcaaggtttgcttgctggtctcttattcctttatccattattatttggctttccaacttcttggggtgtaatatatctattttattttttctgcaggaaaaatggggcaagaatctttacattgcatcgatttgttatggtcgaactgtgtcatgaagttctaaattttttgttaggatgcatctcaatttagctttaccatatatccgctaagaaaaaagaatcgttgtgatcagtgatggtatgggcttagggaaccttttagcaaggttgaatgaatgtttgccaaacttcagtgatgctgcaatgtagtgtatcgactgcaaaaacttatcctacttttcaacttggatgacttgtttgatgaaagaagttaaaatttctttagattaaaaaggtcttgtattatcttcaactaatgttgatttattagaagtgaacgccacagtttgattttatgtggctagtaatgtgatttttattgtgtttcttgcatgccgttttccgttaatcgtgtaggaaaccagggagggtctttgaaccttttggtcttcttctttagctgaaaaatgaggtgatgctggtttaccaatgttcctttggaaatgtaatgatttgttttctgagatccagagattgacagttcgaagttatatgggttgattttccctactttgttgcagaagttcttcactattgtaaactaacgtagtgaaactttaagtgcagaatacggggcatgtcggtacaactgttgctgcctgtatccaagttgaatggtagttatattttcttcgtgctcaaatgtattgtttgaagcatgaagaagaaatgtgggaaagactaaagaaaatctgaatggcaatagcaaatctttgacaatggtgatttgttgcaacagttgcagtatacaagttcacggtggtaaacaagtcgagcattctgattctattctctttcttgattttctgcccttgttttgttccaaatgtctctctttgaaaaataaaagttgtgaagttgcattggccatttatttgggcatctataataataatgttgacctacttattgatcaaatacattcattctctgcattggcaaatatgataaccacatggcgctggtttcaacaaccgtatttaatcaaaatggatccacgcaaagtacaaatcaaaattgtgcacgatttgagggacaatcccaaataatactttgattcatcccaagcttaactcttcgtgatacttgttttaaaatcatttccttaacctatatttcgtttgaactaaaagcatatacatgaagtaacgcttcattccaaaaaatctaatgctcagcggcaactgactgagagtgagagactgagagttaaattcatttaggtctacacaaaacccataagagattcaagattcccgtttaatcctaactatggttcctccatcacattatgctggatatatatattgtatgtatgcatattactttagaattctatactctagtcagctttgtgctttcacaagctattttgcaatattcagcatagtggggaagtttaagctagaaacctttctatggtaatttggtattgaaaggcgaattgatccgtgagtgagacctggttttaatgctgtttcagcgcatgtcatctgcaacctgtgagccacgaactgcccaaaaagacgatggcttcaacttcttgtttgtcgctgtgaaatgccaaccaagctgggtttcgcacgtcgcacagtttgcaattgtccaagcatacctgcagatttaagacatcaatcagacttgaaagatcacagatttgtctgcttaataaagtacatgaaccaatgctctaaacaagttagcatatgtctatgaacacttggtctaaacgattttcttacaacaaactgcgccagctgctttatatgctaatgctctaaacaattagcttgttttgaaccaaagctagttttcaaatcatacaacttggaaacccttaggatctataatagctactgagctatatttcttaactactgaggtatcaaatgagtgataagtacagtgaaggaaataggtcaactgtttcaaatgtaaaactggttaaggacaaatattaattgaaaactcttacccaggaaaccagctgtcctttttaacaggtctacctctaagcgctatgtcatttgctttgtaaaaggtcattatctcgtggacatagccatgtgggtttacgtaggcaccaagaggaccttcattagacataaccaacatgtcttttcttcttgctatgacagtctgcattattaatatgcaaacgtatcagtaagccaaatattcaatgaagaggaagtggaaatggtatttaccatgctcacacaaaatacctgacagtgtatacatcgaacacgatcaaaactttcaagcaattcaatttctcgctgcaatctataggagactccatccagctccaagagctcttgtctaattgactcagacacgggaattttactcgcaatggaaaaggatagaatatctggtttattcacaaaagcctccatgtttggaaccccaactatttgcttccacagatctgcattttcttttaacattagcagacgctaaatatgtgtgctacttatagaaaacgatcaaaataaacaaggagtttaccgactgctctttgagcaagataatatgagtcaaacatcctatacgcccagaatggccaaaatgctcttggcgtcatacggaatcggcttagatcagtattttgccggaaacttgccagcctattttgcttctgatatttctcttgtgaaacaggagtcttgccaattgccgattgctcgtcttcattttcgttgtcatggctagaagctaaacatccaatggacctcaagctgtatggattagacccactagattggactgtagaggtgctgactacttgatcatcatcactacttgttgagttacaaaatattgagtcaactactgaataatgaagtcttttttctgacggagaaagagcactttcaaaactttcttcagaatttgcttcagactgtgcgtccatatctctaagaggtgtagataaagatgctgtacccaagggatagcgacctcgcaacttgcttagcggtaccagttttccaaacgcgtccctgggagtcctcaagggcacatcttcatcaacaatttgaacctctccgcaagtctgcaagaaggatttaaaagatataagcctctgtcacagtaaacaaagatgcattccccatttctactaataaagatgcagagtgtctatgtatatatatgagaaaatgtccatacaaatccttcaacgtcagtccagcgatgctttaaacggaaacgttgttgtccacgagtaataacattgaatgaaccatcaccaagtcgacggtattgtcgtatctgtgattatcaccgaaaatagtatgttacatatcaagaacaagaagatccaaagatccaaaataaatccaccaattaaaaatataaaacaacaaccatagcatttcccaacttcctacatcaagacccctgtctcagccattcctccagaaacattgcacaaataatttaagagtccatagtactttaggcaagaaatcgatcaacaagaatgccaagtgtaaaatatatttatttcttaagatataccaccaatcatatcagatattcagatcccacaatttcaaatacaaaactgcagatattttcaaatacaaaaccacagaggtcttagattagacaaagcaaaacaaagatttagaaacagaaaactgaaaggtataacttcatctaacaatcatttgaaaggaaaggaaataagaaaatatagaaatataacctctgcggttgtccccacactggcatacttaaactgagccccttctctgtaaacacgaatctgaagataacaggatgacttttagatgagtaattttttattgtagaaaagaaccagatatttagagaatccaaaacaagcaaagcaaaagattaagtcacctaccacacctatcgtagaaggagcgttagcttggttcaaagctctctcaacagcagccaagaaactaggctgaatgattctaagggggagtgttgcctcaggaaatagaaccactcctgaagtattgcaaagcaccagtgtcaatgtcttacatacatatttgagtacaaaaacaatagcaggagatatatgactcatcttaacatacatgtcttacacaaattggtttaaagaaacagtacttcttgcaaatccgaagaaagaatcatggtgtgctctttgaattcaagttagcatcccatgtcagtgaacaagcaactagattcttaaactaaagctacagaagtcaccacaccatattattataaataccttcaagatagaaaagcgggatcttcaataccgttcctccatccacaaaagaaactctgttttgagtgtcttcaacctctgttaaacattacaaaaccatataagctcaaatgtggtaaacacataagaaactacctcggaaagaaacaagacgggagaatcgatccgtaccgccaagatacatatgtaaagaagccaaagctgggttgaacataagttcatcatcaccgaggttaccactgtcaagcaccaccaaatgccaattcagagattactgatttgttggatccgttatctaaaggattacagatttacaactatcaaacatcacgaaaccctaactaagcaagaactcgaaaatcaaactggtttaaacacttgaaactgattctagcaacacattgagccacgcgtagtcactagaaataggcacgaagagagtgtagaacgaataagtaacaaacgatcgtagagggaaaccaaaaggcaagtgttaagaggagagattggctcacgaagcttgagcgtgggaagagaaaggaaatgaagagagatcatcattattatcatcggaatcggaatcgtgaaggtcatcgacttcttcgacttgtaattcctcgaaatcaagctcacgaatctgctcgatctgaagtctctctcgctctcgaatcctctcgtcgtccatttctctcgagtttcgtttacccgccagtagagagagtcccctttcgccacctccgcgttttccaggttcgtctccatctggattgggaagtttattgggccggtttttggatccaatacccggcccaactatcacgggttaatatatgattatagttttaattattattccgttacccacgtttttttttttttacttgcaaatcatatgaaagcgtctatattgaacaaagttgttttcccacgccatctacgaacaaagttgctaacaaattgatcaatcacttatattgacatagattagatttccaaccataattcagccaaaaaagaaaagaaaaaaattagtaccactactactaagtaagtagtaattatacaattcgattttcaaatttaaaaaatgacacaagacacaatcaaaagaccataagtcttgccatcaagaatgaagctttataagtttaacacttaacaagctacatgctaagtacaacgtcagccaccgtacttgcaaaggttctcgaaacccatgtactcatgccgttggattttgccgatcatattcactattcccacgccacctacgaacaaaaagaaacaacgataacaacattacatattgtgataaaacccgcccgtggctgcgaaaatagtgttgggtgagagggagataatgtaccaagcgatatcgcactgataaagatcatggacgcgaggatgaagatgatgagagatgcgcggccgatggctgcgattagccttctgactacatgctgtccaacccaagctgcaattgttgccactcccacaaggtacaaagctgcacaaacgtaaacaaatagtgaggatatcgtgaaactttaatggactccgtggccttattgaatagaatgaatgacacagaactcaccatatggaacagggaatcgtttgagaagatagtattctacaacagacatggatgatgagaaagtcattgcaaaagtggctgtggcacttgagacctacacacaaaaaaacacacaactgttgtacaataacaagtgattctaaattataatgttgtaataaattcattcacacctgtggtgggacaccgagctccaagaacaatggacccatgatgaaacctccgcctaaaccaagtaaaccaccgactatgcctgctattatgccaaatgtacaatacataacaagctgaccaacggtgaaattcgagtctccttgtcccttagacgcaatgattcttctaccctggtacaaagctactgcttcatagcctgatacaccaactgcaaccggaatctaaattacagtagcaaagcgtaagtatttgtaagccgtatacgtagatctctctgcaagaaaatgtaactgactacgtacctgtaacagatttatgacccaatatgctactgaacaattagccagattttgctgtttccacagtaggacatgaaaagtatcagcaaagtttgcacatgaacaatatatatgtgaattgcttgataaagaccaataaataaccttggatatctgcagcgccaggaacacaatccagacaaacacgagaagtcccagttccttccagtatacattttcaataatacttacctacagtacattagcatggttagttgtgacataacttgcaaacacagaagaagcactagtgtaaagagaatagcatttacttcttctttctttttgtttccagggttcgtgctcggggctgcgggaagaggcacgtattccacttctgtgccagatacacctaacaaaaaagtagattatgtgaggaatgttttcccgataaaagaaaaaaaacagagattgtaaaatagtggtccctgaaaaatgtttaacaaacaaaaaattaaactcaccatttgactctaaacgtttagcagcctcctgtaacacaaaagaaaaaaattagtttggtggtttttcattaagattgacactatctagcaataaatcatataacaacccctcttaggtgttaggtggtccatttgatgccttagcaagaagttatcaaggtacctttttctctatagtctccttgttccaagtctcagaacccttcaagaacgcctttgttgacgtgcctgcatacatacattcataacaaaacggtgattcgacgtctaattaaccgcgaatggtggaaaggacgtatattacgaaaccgattaccaagaaagaggacgatgagtagaactgtaaccaaccaatctggaaaaatcacattaaaagcaacaccaatactaatcccaagcataagcataggctggatcagtaaagcgagatcataatcaatgataggcatgtcaagtgttggatgcctcaatctaagattgtaatacacagtggacacagaagcacccataatcatacctaagaaaatcatgtcaatattagtcaaaaaaacatcaagacaaaaacatataatgttgttaactaaaaacttacattttgaaatagctgtagctgatttaggatcaaacccaataatcaaactaagcataggtacgaaaatcccaccaccaccaacaccacctacactaccaaacgcagctccaaagaatccaacaagtgttcccaatacaatttgccaattaaactcaaattcctgtttatacaaataacaaaatacatgtaattccgcgtcatatcacaaatgtaaacaacattcgctcttttgactgacaaaaaaaaaaccattaacatataattctgacacaagagatgaaacttagaagaagaatgatacttacaggccaaacatgacgataacctatttgatcagattcccatagaaaattgatagctttaaggaagaaacttgattcattttcccgcgtttcgtctgtacttaacctcagagattttcctcttctctcagcggaaacgaaagcaaaagctagagagaaattgattaagaagatggttacagatcttaaacctaaccatttcgatctcaatttcgtcattgtatacgaagaagaatcacactgatttcaacgaggatggtgaaatatccccaaaaactaaaggaagaagaagaagaagacaaattcaaaatgggaaatgtgtcgaaggcttccacaatctaaagcgagatcaggattcacacgacaggtgcataagagccaaatttactctgttgagaaaaaaaaaatgaaatttcgaagtggagaggaggtctcgaatttttgttttatgagaaatgccaagacgacgagtgattgcgtatgatgttatcattgatgatgcaattaggacacacactagatcacgtaatgacgtaatacaattacttttttattttttatctgtactttatagttttatttagacaagcaaatgtccgtattcggaccacctgccatggtttgtattggaggattggcggaaaaaatgaaagactgaaggaaaatgtgtctgtgtattctaaagtgagttttttttttttttgtcggccgggccacaaggactgggtccaaactccggtagtccgttttctacatctatagagtcaaactccaattgagaagagatagtaactagtggtgacaaatgaaactttatagaattggaatcgatacgggaaccgttatgtatttggattacttgaaatataattctaaatatccgatcggttttagaatttggtaatattatatacctttgcccaaaaaacaaaggtatattatataccttatgagtcataagactcaatttcgtatgtgggctaagttaacagatggaccttttaaagagttataggcccaagtagatatgttcttggagaagcccagttgacgattctttcttgacatcttttgttcatcgaaaaatttgcgacatacattttgactatttatttttgtctggaattttcaacagatttaaagttttgtcataaatttgtcacaagttggttgagaaatttcaacagaatgtatgtcacaaaatttcgtaatgtttcagcaggaatttggatgttttccgcagaaatatatgtctacacatatcatagttataagacgcagaaaaaatacaaaacgtttataagaccaatgtaattttattataaagttataaactcagttactctaattactgtaatgttcactaattgtatatttagttgtcaccagcaaaacgaagtcagatttaaagacaaaacaacgtctactttgactattgttttgtagttcagtagtcagattagataccggcatttaaaatgctccctttcaccaattaattattcatacaagttggctaacgcagtttcacaagcctttcaaagctgactttgaattagtctcagttttacgtctccttatccatccatctactacaaaatataaataacacagctaagatattcacaaagacacaagacgaaatattcaaccaacaaaacaaagacagaacagaacagaaggaagaaatgatgttagaatcttcaagcaaaaagagatggaacgttaacgtgttatcatcagcttcatctcacagagagacaattgtacttggaagatatagcaagagttgcagagaacagaagcaacaccaacgaagagaaaggctcttgcccaaatggaaggttttgttgatgaagcttaagctcttgccttctcgtgcttcttccactaaggtcgtggcttatgagccttgtgattactctttgaattttgatcaaggtccaggatggcacgaccacgatgagcctgagaatctttcacggtctttctcctgtcgcttcgctgatcccacacggatccgagaaacacgctttctcttgtattaagtttacttttcttttctccttcggtttctttagaccttcttttaaatgatgagattatgtggcttagcattgtaaacaaatgaaaagaaaagttaggatcattgagttaattttatttgttctagtgggaggtcataaattatagtatgtctcattacttctcagtcactcttcctttccgggtttctctacttctgtaaaatcattttgtctactatatttgctttcgtttttttaaaagaaaatattgaaaaactttatagtaataagatggaccttaatttcacattaatctacttcctaagcattacaatttataaatcattaatgattcataatacacaatatgtgcaaatattatactatagtctaagtacaattgtgtaagtcatatgtgcaaatattatatagtctaactacaattgtgtaatttatatgtaagtgcttaggtttaatctcatctcatgtatatataaggcatggcctactattgaataaagtaggaaacctttataccaaactaggcttcttgacactcctttctgtcttgggcaatcagtagaactttgatgcctttatgcagcaactatgcatagtatactcgaagaacaattgagaccgaacgtgtgcatcttgaacaatggacactagaggaagactatcacatttttgattgttagattttggttttgtttttcaccttttggtttaagagttttgtttttcattattcctttgtattgaataatgaattgcattgttcctttgtattgatgagtacgtagtggaatatttttattataggtcaattgatgaatttatattaatgatcaaaatgtcattacaaacaatacggaagactaaaccaaccaaagaaaagttacaacaacaaagctagtaaaaacagacacaagggaaaacattttataaagaactattagacaaatctaagcgaaacaaaccataaattagaaacagagaattaaaaacaaaagctaaaagttgttccagattattattccacacccctttcttaacctgcaattaccaaatgtaggatcctaaaacttcttgacgaaggttaatagagtgatactactttttcttgggagatttcagagtatcttatttctttacatcgtgaaccttttgtttttttctagctatctatgttattcatgatggaatttgagctttgatgattcaccaatcatcaaagtaccgtgggacttaccgaagtgatatcatcttcagtacttggacttacattagagcctattgatgcacgtcttctccatgaagatgactgtggaaatgagcctccaaagtttaggttcgtattgataacatcacataataacgtaagtagaagaattc

SEQ ID NO: 284 - DNA, 87080 bp, Arabidopsis thaliana
aagctttagtgagaggaagacaagttaggaaacaagcagctgttacattgagatgcatgcaagctttggtgagagtacaagctcgtgttagagctcgtcgtgtgaggatgactgttgaaggacaagctgttcaaaagcttttagatgaacatagaaccaaatctgatctcttgaaagaagtcgaggttcttgtctttacctttttagctcattggtttgatgattgtttattgttttgagatttgttatgttctcaggaagggtggtgtgataggaaaggtactgtggatgatattaagtcaaagttgcagcagagacaagaaggtgcttttaagagggaacgtgctttggcttatgctcttgctcaaaaggtaactaacttgtccacattcaacatcttgtttaagttcgtgtctgaagctgaatcgggaatcttgttttgtgtagcaatggaggtcaactactagctcaaaccttaagacgaatagttcgatttcgtatcttaaaagtcaagagtttgataagaatagttggggatggagttggttggagcgttggatggctgctaggccatgggagactagacttatggacactgttgataccgctgccacgcctcctcctctgcctcataaacatttgaaatcaccggaaactgcggatgttgttcaagttagaagaaacaatgtgaccactagagtatctgcaaaacctcctcctcatatgctgtcttcaagtcctggttatgagtttaacgagagctcaggttcatcctcgatttgtacttcaactacgcctgtttctggaaaaactggacttgtttcagataactctagcagtcaagcaaaaaagcacaagccaagttacatgagcttgactgaatcgacaaaggctaagcgaagaactaaccgcggtctcaggcaatctatggatgagtttcagtttatgaagaactctggaatgtttacaggggaattgaagactagtccttcctcagatccttttgttagtttctccaaaccactcggtgttcctactcgattcgagaagccgagaggttaaatgtgaccttgttagattggagtttcaacagcttgttgttgtcttgtgtgttgtgagatatctgtgtatgttgttaattgttctttttcctttggaactacattggagttttgaatttaaatataaatttcagtcttgcttttatttcacttgtttcaagaatcagaatcttttgatggttctgagcttaaccccgttcttgaagctgagaattataccataatcaagctgcagtggtatctccatttctagggaatgtctgaaaatgtaattacggtagagatgcagtaatgtgagtttgatctcttgcagggcaaatctctgtccaacacaggctcgtggaccgataccgaatgggatgaaagcgtatggatgtctatgtttctcctcttctccgttcggatcaaatctttccggcttgaacttctccggttctggaaagtttttagggtcctttgctagaactcctagtgctaaccaaacccatgtcccctaagcaacaaccacaaggtaagtaatagattacaagtgctgactgtaaatggactaatccgcttgatgggtttgaatatacctttgggagtaaataacctcctatctccacttctttagcagtttcccttgcaaccaaaggagaaaccatgtagaatctcatagcctctttaatgacctacaaaggaggcaaataaaaaacattcataaagattctaatctctcacagaaactcaacttctcggtttttgtttgttactaatgaagcacctgatcgaggtatggaaacttgtgttgtaagtcatgagcagtcgggatcagatcacggttcccaaacccgtcaatttcttgaagcagacgtttctcaacatcaagatgaccagagactaagtaaagaacagaggatagtgtgaaagcagtggttgcagagccagcaagaagatgctcataagtcacagcactaatataatccgatgtgaagatgtttttggcgaaaggatcggactctcgagctttcaaaatcaatgacaagaagtcttttgagtcagtctcagcctccttggctcgctttgacacaatctcattaagttgtccactcagtcttgcattagtcttctcgactctccagtccattgttcccggtatcctcttcaacacctgcctaaacggctcttgaagaatcggaatcagtaagcctaagatgatagagagtgatcctgataaatccatcttgagttgtgttgtagagtagacatgctggtttatgaaatcagtcacctccacatctttgattggtttcttcccggaaagaccgaagtcgactccaaaagccgcttgtccgatgatatcagtggtaagtttgaggaagaggttggagaaaacgatatctcgcggtttagaatcaagattatgagtagcagaagtgatgaaactatgcattgtagggataagacttgttaaatgtgaaggctgatagagagataggatggtgtttctcattttagaccatctcttgtccctgtcaaagaatcataaatggttatagaaacaaaaacatacatagttttatagagcatgtatgtaccattgtacctggtgaagaagaggcctttcttgtgaagaggagaagctgagattggggaaggaatgcttctgtttggaagatctttgaacttctttatcccaacttctctgcaaagctctgcttctgctattattatcagtggttgcctccccatctgaaatctgtttgttgttaatttaaatggacatgatcacttgtcttcattttgttttttagacacttgttgtgttcatcactcagtcataacaaccataagagatggccatatataccaaactaaaccaaaatgattaaacaaaattaaacataatgtgtttataaatcatttaaattaaaataaactgaaaatcaaatgaaataatacaaaaactacattaaattataaatgtttttttccattaggttttcttaattatttatctcttttggttaaattggtttcattattatcaaatgactaaaaatgaaactgaagttataaataaacagaaattcattaaaaagttatattttttaattatatatgttaaaaagtacttgtatattaattaaagcactatttacatgaagttgttttccttattttaaaaatcaaactgactctaaagtctaaacagaaaatcaaatcaaataaaccaaaaattacattaaaccgaacaaattaactaaaactgtttttttttgtcgacacgaaaacttaaaaactaaactctaggtctctagccaccgaaaacagaataaagagagagagagaggagaggtacctgaaaatagggccatattgcttagcaagaacggagaagacatcaggaccatacttagccatcaagggcaagtgaccaactagaggcatagcggttggaccgggaacattgcatacggaccaggagggtcggtacaagtaaatcacaattacaaccgctgcaaaagtcaagaatgcaataagagcttcgtgttgtgtcaagaatggatcaagaacttcccaccattgatgttgcgtcttcatctctctaacctctaaagttctctcttctttagtttaatgtgtgggtttgtttgttaggtggttcattaatttatatagtagttgatgtgcttttgaaaagtgggttctacactctttccactagcccacctttagaatagcgtgggactatttcgcaagaagacaacatgcgttgaaattattagtcaagtactcaagttctcatctctactagagagtaatattgctaagttattgtaacgcacggaatccgtattaatttttatgtttttttttcttgtcaacatttaattatttagtgtttaattcgaaactatttaactatatttaatactcctctatgtttgcaaaatttacatattctaatatttttatattctgaatgttagttttttgtaaatatatgattataaataaacagaatactatcttttgagtatggggtccttttgatgtttgaccaatcttcacccatcgttgtacttttgttacactactatcaagtgcctctacttgtcaaaggggtttaccgtcaattggagtaaaccacgcttctacttttggtctcctttctccacttttttttttctctcttttattttggatcacaaattgttcttcctttttcagttgaaaaaattattgatggttctttagttttgtattttaatgggttagggaaagaaatggctatatatggaggagattgtttcgactttcgagtttggacattggaatataaaccaataattgataaaggagaaatttgatcattgcatgaccatcatttatggagttaggtgttccttttctatcatgattcatgatattagaatattagatcattgtcttaatttttggtttagagttaataatttttgttcaacatttctatatttttatacaaattttgaagtctttttttttttcttttctttcatctagttacgttttttttctctctccagattttctgttctatttgttagaattagagttaagttgacatgtatgtagtaagggtattaatttgcaccaaagctattgagagggagagacgaaatttcatcgaaatacgaactgttttataattcattctgcgattttttggtttgctcaaataatttttaacaaaaacaaaacattgctccaataataatttttaacaaaaaaaaaacattgctccaacaataatactaagtcaatacatgtaatgcagatattactcacgtgataatagctaatcgaaaatccaactaggaattggatggattctagtccagcccacgtaagtcctcaagtatctagggtttaagttttgttgtgtatatatatggagttataacagagagggcgagccgatgttgatcacgctctcacatcgtcgattgattcaaagatggaaaaacctgagtggtctgaattacctggagacctcatcaatttaaccgcaaaccgtttctcctccattagtgacgtcctccgtgtacgtagcatctgtaaaccctggcgttcggcggctgcgacaccgaagagctttcaatgcaaccttccttcctccaacaagatgatagagactgttctctctcccaccactttcttccgtgtaactggcccttcttcatgttcttacaaaggatggctgatcagaaccaaacaagtctctgaatccagtaagattaatctcttgtctcctttctttcgccagctcctaaccccttcacaacaaaccctagaccttttgaaatttgaggtttcagagattcgccaatcttacgagattcatatatttgataagtatttaatacaaggcgtgataggtaaagaaggaccatcacatatattgtctagagttgttttcctagacaatctgattttcgcagtcggacaggatgacaaaatctggtgctgcaagagtggagaagagagtagtagaatatggacaaaaatcaaaaaccaagttgaagatttcttggacattatacttcataaaggacaagtctatgccttagacctaaccggcgcaatttggtggattagtttatcaccgctcagcctccttcaattcacaccttcaattccaatggactacgacggatatgatagttgcaacaagagactcgttgagtattgtggagatctatgcattattcatcaacttcgcttaaagaaagcttatatccgaaggagtcaaaggacagttggttttaaggtttataagatggacgagtatgtggcaaaatgggttgaggttaggtccttgggagacaaggcactcattgtggctagggacagttgttttactgttgtagcctccgagtaccatggatgtttgaacaattctatctacttcgttgataatgtgcgaaagagtgtgataagaatgaaactatgaatttctctttcttatccttaaaatcccaattacaatgaaacaaaccctaaatcgataagcttggagttacagttctccaatcttatctcccaagaacagagcacataaagctctaatcctctttacacatcaatgatcacgcaggatgcttttctctctactctctcttactatttataatcttcttcacacgtgactccaatctctcacttcagttctcacacgtgccaacttctcatgaacgtatcagagtggcgcagaagctgatcaatttatcaagcatgatgatgagagttccgagtaccatggacttttgaagaattatatctacttcgatgataatgatggagaatattgtaatgatggaatgaatgatgaagctgttaagatgttcaagcttggtgatggtagtatcatcgatagtactgagttttcttctcatagttgttttcacatgttctttcctccgttcctctaaaaacgattaattatcttaaatctgaatcttgttttatttattgcttatagttacgtgttgtgttgtgtgcatgatcttgtaaatgtttgcaaatccataaacgacaaacattgaatatagaataatttaatccaaatttgaaactggaacatcatctataagaaacttgattaaaaaaacttttatgtcatgagttattttttcttgaatctaatttaacatttttctttttttgaagttgtcgtgagttgttacataggactaggatgcagcaggaacttgatctacaaaaatatcacacaggccatttagttccaattatgtcccaagtaactagatcaacaagtttgtaaattttatgaacttcaaaattaaaagtgttacattcaaagaaatactttcttagtatcatgacctcttttctctaagaaagcttagcaaaagttactaattacataaactcctaaatgttgaccaaagtgagtactaagataagtagacacggagcttgatactcttatcgcagctccatctcatgcttctaaggtctggagaaggaaaaacaaacaaccattaaaattgtcaaacgaaatcagagttttttattcatcagaacaagaaaacacaaatgtacaacaaaccacactcaatgactcttccttgagtcaaaacaaacaaacaaacaattcaactagtaaataaaagtggtagcattaccataacttagaccgcaacaagtagatgtgttaataccgtatagttaaggttccgaaccaagaaaacccatttgatcaaccatgtcatgtagatcttggctgtcccaatccaaaggcgaaccaaccaaatcttccactttcacatccaacgctgcttccaaattaccatctctcatcatcacattcatagcctccaaacattgttcctccttagtaggcatcgaattattcgcctcatcatcgattgctgcagcgaacaacatttccatatcatccttcattctatcaaactcttgatcatgtaacaaattctcctccatagtccccaagcttggagtagaagtaagcctccgtttcctccccacatccaaaccaaacaaactcttcttctctttactcataaccgcaaactgctgaacaaagttcggattgttcaacgccttggcaaggaacgtcatcatctgctgctgtctcttctcagtaacaagcaaccgttgctccatagctgcaacttgactcttggagctgtgttgctgttgcctcaacctaactacctcagctacaagcacaccatgatccctcttcaacctctcaacctccccgtcgaaaccgtattgcccaacctcaacacatgacatcccagatccttgctgattcacattctgcaaacccatgttcctccttcttttgatgttcttcaagagatgcttttgtcctgctaaaaacccttcatttgcaaattcccatctatctggatcaatctttctgaatccctgcaatcaccaaaacaagtttcatcagctactgaacttgaggcagagtccttacttatcattccaagattctgtttttactaccaaacacattttgaacttcagaaacagaggattgaacagagtttatgttaaatgattctcttaacatatgaccaaaatctcaatgcatctaatttcaatttagccacttaaaagcttaaagaactaacctttatagctgaagactcataggaaacccatctaaagaaatccaaaattaaaaattagaaacaaaaacagaaacaagactaagtagatataaggaagcaaagaggtacttacataagtattgagctgacgaataaaacttgagaaattgctatgcttgaagtaacgtggaaggagagttgttgagaacttatgagaatcccacaccacaaagctgttacgaccattactccaagaaaccaccgtgtccgtcgccggatcttccaccatttcgtaagtcttagtcagaaacggtggtggccctgtttcgttaagcccttccattggtctaggagaggaagaggatcctacagatgaagaagccgctacagaaccagtaaacgtcaccgtttcttcctccatttccactttcagttcttccattttcgttgtttatctcaaatccataagctcagagataagctagattgtatgaatttcgtaactttcgagaaacaaaagtagatatttttgattttgttgctaaaattagaaactgggttttgggtaaagtttgcgactttcttcagaaaatgttgagttttgagttgagagattgaggcgtggaggagagagaaatgaaattataaggggagagaagagaaggttctagagacaagacaagatcatttcactgtattgaagcttctttgacatttatgtgagcacgtggcgacaagacaagacaatgttccagaaacttcgttactaatctagaatctctttttttatatatatatcatatgggcctttacttaagcccatttctaacgatgccaatttatgttctaggtccttctttttaatgtgggccgccagaaaaagcctactaaaatgaattattgggtatgtccaagggtatttatgtacttaagaggcgacctacatatctcgtgcgtgtctccacctgctgcacaatttttctctcacccgataaccaaacaggtctctcacgtgtaatttagtgtttttaagactttagggaataagattagaacggttcttccccaaacacaacgaagaagtcttttgtttccgatatagatcgaggaacttcgatttatcagacattaacaccaatttttaagatatcgtgaaggagagatttgattgatggcttggaggcgcatcatcaccaaggtttttgtttcatttttctcttttcccctttatccaatttttaatacgaaaaaggtttcgactttggtttgatactgtagtggatttgatctaattagataataatttctgatgggttttatcaagatctttgtgattcataagctaaagatgatatttttcaaaccctagaagctcaaattcttctctgccctcaaaatgttgtcttttaggattctagattgtctctgtgatattgtcatttgatttatttgactacccaagtcacctaattttgaaattggtataaaaagtttcaatttttttgattcaaaatgggtaaaagtattcacttttatcaaaatgttttcatgtgttgtctagtgtcattttgagtttgggattagtaattaacttcatctgtattgattctcttcaccgatgacaggtttcgagtcatgaaagggaattgagcagtttaagaagcttacttgttagagcttactcctcttttcctagagtgggagttactggaggtaaattctgattccgtttatgagttgttcttgttgttttagaagtgtttttgatgtaaattggttttattttatctatagctgtgggtggtggtggagcttctttaccgcgaacgaggtttcaatcgagttatgttggtagctttgctcgcagagtccgtgatagagaagaagttaatgaggttgcacatctgagagaacttattcgaagaaatgatcctgaggctgttatcagaatgtttgaaagccaaccttctttgcatgcgaatgcctctgcgttatcggaatacattaaggcattggttaaagttgataggctcgatcaaagtgagctggttcgaacattgcaaagaggtgggtaaggagggagagactgtttgtttgaatctgaatggatacttggattgtgtccttgctttcatatttgtattagcagcttctgagccatttctctatataatattgggaaatgttttgctgtttttcttttaggtattgctggtgttgcaagggaggaagagacttttggaggtcttggggcatttagaaacgtaggaaaaccaacaaaagatggtgtccttggaactgctagtgcaccgatccatacgatatccacagaaaggactcactttaaagaacagctatggagtacaatccgaactattggagttggttttttactcatttctggtattggagctcttatcgaggacagaggaattggcaaaggtagagtttggttgtgttttcttcagtgatccaatagctgtattgaatgactttgtgctcattaatttatgcttaatacatgttaggacttggtttgcacgaagaagtgcaacctagtatggattcgagcaccaaattttctgatgtaaagggtgttgatgaagcaaaggctgagctagaggaaattgtgcattatcttcgcgaccccaaagtaaattcacagtgctagagtgtttttctagttaagtataaaatctgtctagtgatgtaaattcaaaagcataaatcatgtgaagttatcatatagacctttatcctctgaattatctgtgccaggtttttctagagttagtactgttttgttcttaggcctcactctttcatcttttgatctttactatagaggttcactcgtctgggaggaaagcttcctaagggtgtgttgcttgtcggtcctcctgggacaggaaaaactatgcttgctagagctattgctggagaagctggagtgcctttcttctcctgcagtggtagtgagtttgaagagatgtttgttggagttggagccagaagagtgagagatctttttagtgctgcaaagaagtgctccccgtgtattatatttatcgatgaaatagatgctattggaggaagtcgcaatcccaaggaccagcaatacatgaagatgacattgaaccagatgctcgttgagttggatgggtttaaacagaatgaaggaattattgtggtcgcagcaacaaatttcccagagtctttggataaggccctggttagacctgggaggtttgatcgtcatattgttgtacctaacccagacgtggaaggtcgacgccagattttggagtctcacatgtcaaaggtaacttcaaattatgtactagacagctcaggttttgcacagtgacttgtaatacagcaatgggatgaattttgaaccgttggttggctgtctttattgtgcattttcaggtacttaaggctgaagatgtcgatttaatgatcatcgctagaggaacgcctggattttctggcgctgatttggctaatctggtcaatgttgctgctttaaaagctgcaatggacggttctaaagatgtgacaatgtctgatcttgagtttgccaaagacagaatcatgatgggaagtgagaggaaatctgcagttatatctgacgagtcaagaaagctaactgctttccatgaaggtggtcatgcccttgttgccattcacaccgaaggtgctcttccagtccacaaagcaaccattgtgcctcgtggtatggctcttggcatggtttctcaactaccagataaagatgagacgagcatttctaggaaacagatgcttgctaggcttgatgtttgtatgggaggccgggtagccgaagagttgatttttggggaaagtgaagtaacttcgggtgcatcttctgatcttgagcaggcaaccaaactcgcgagagcaatggtcacgaaattcggtatgagcaaagaggtgggtcttgtggcacataactacgacgacaatgggaaaagcatgagcaccgagacaaggcttctcattgagagtgaagtgaaacaacttctggaaaaggcttataacaatgcaaaaacaatcctcacggtttacaacaaagagcttcatgcccttgcaaatgctttgcttcagcacgaaactctgtccggtaagcagattaaagaattgcttaccgatctcaactctccactgctgcaaaagcgtcaagaagtggttacaaagcaaagcaacccggttcctccatcaacccctagctcagcatcatcagcagccgcagcagctgccgcagctgcagccgccgccgccgcagcagctgcaacagccgcaaccaaaggtaaagacatggcgccagtatcgtaaaaataaaggagctagcgtttggtagagaaggcgttttcatgtatttgtgtatgttggggtaattgaattgggaataactctttattttgagagtttttagaatcagtgagaggctggtgagggttaagagcattaagcttaggacaatgagattaacatctcaggtttttctctatctctatctcgtacacacggaatctcgctgcgaaatggtatgtgttcactttttctctaaatgttttcggaatctcgtgggatgttatttagaagtttggctcgtacagtttcaggttacactaaattctaaagcctgcttgtaagactcaatgcaataaattttatagtctcttgttattggtctaactctagtctaatcgcttcctgctcaaagcaagtccttattaaactacgtgcactgattaaactatctaaagaagaatatcatagtaacaacaacaacaccgattaacactagtgcttggacttctggctctcgacgttcaactgaaaaatacggtacatgaccatgagagcaacatccagcatcagctccacatccatagcaaaactcatgtccacatctgccaatttataaagtaacttgtgatcatacaattcgaaacaaaagaaattcgaaaagagatgtgattagagatgatacctgcaaattacgcggacgcatccttgagtaagttcaatcatatgtttacacttgctgcattgacgccaactttcctgatttgctagttcgttaagctgtttatcgtttgttgtacgatttgaatgcaactttttgtaacgtttgcacgacaagttatcatgccacggaactttgcacttgatgcaaaaggattcaccgcatttgacacagcatctcttacttcctgtgagttgatcgagctcggttactgacattaaagctgagcacgtcgggtttgggcaataaactctatccgttacaggaatcgaatcctctcccatcctttgtatccacatctcttttactttaggtgtcaaaatattaacacaacttccataagtcagcttagatttgcacctataactaggacatgttatcaaacttccctgaagtagactcacctcaatatgtcgtttcacacattcggaacaaaacatatgaccacattgatcaatataaaacatcatatcagcattgatgtcatcgtcgaaacagatagtgcaagtctttttcggatgaaacagagcaggcacatctatctttaccggatgaaacagagaaggctatcttggtcttaaaacatattgcttccattgcaactttataggcaaattcaacttgatttcgagtcaccagaacagcgatgctagaagtaaactgttttctgatgccttgcacatcacggattagcatggcaatgttttcttcctgaggcgtggatctccccatgacctaacatttaaagcaaaacatcaattataagattgaagcaaagacgtgaaggccaagggaaacttacccattcgaaaatctgattgttatcgcagcagattgagatatgattgatccccaaagtcacggcttcgcttaaaccgtacttcaatgccatcagctcagcctctaaaagtgtaatggctgagtcatgaatcggtcccttcatctgaaacatcagaccatccttgtacccgcaaatcgcaaccctaaattctgctgataacttgggcgactcctcacttaccaaacccttgaagtaaaggctgtacggcgagaattttgacggtgatggtgttccggcatgttttaggttatctgctcgtactagagtgccttcctcttccatatctacttgaagcttctttctatggagtcacgttttatgtttcaataatagtaaaaaattataagtatcaacttattgaatatcacgttggtgtaaaggtatatttgaaactttctaatctttcacttaatctctaatcgatgtgggatgagtttcacaatgacctgattcaattttttatttaccatggagatctttgggttggattagggctgggcgaaaaacccggacctgatacccaacccgatacccgaaccgaaaaaaccgggttggggcgggttagggttttaagatattactttattgggtagagttttagaaaacccatgggtatcgggtcggtctgggtattatccgttacccaaatagggtacccgaaaacccgaacataaatttaatatcaaaaatattaattatatttaatcttaatataatgtaattatctaaaattaaaattataaatctaaatatatcaattaattttagatctaaatacccaaaacaactaaactatttaaaaattatttgttatgtttatagtaaaatatattcaaatctaattaaatttattataaaattattaatatttaagggtttttttggtacccgctatctacacataaaatacctgtttacattttgttttggtatttttagggcttgaaactctttacccaaaccgaccagaacccgagtgcacccgaatcggaccgaaaccgaaaattctgttttaccctattgggtagtaaatccattacccatttaacccgaatccgaacgggttacccatatgcccagcccgttggatatatgtttgatggaacctggaccaaaaaatccatgttcagaatctcaccatgttcaaaaatttataagtatcaacttattgaatatcatattatcctcttattattaaaagggaagtacaaattaaaattttgtctaatttgacctcaattttgatttcaattttggattttgttctttgctattcaaaatcattaagggtaatttggtcttaacaatctattaaactttatatgatctgattcaatctaaaccgttcaataaaattaattcccttcaatctaaaccgttcaacaaaaataagtaaataacaaaaaaaaaaaattaaacacattcctcttatcactaaataacaaccagaaaaaatctcaattattatttagttatgcttgttttaaattcttttatttataagtttaagatatcaaatttattcaaatatttagtataaaaaccaaataaaccgattgcctgcggtaaaccgcgggttaaatcctagtagagagtgatagagagtgacctatgcgttattgttgtcaatttaatcatctatttcgtatctcacacacggaatctcaccacgaaatggatctttaatctcttaatgttatttagaagtttggctagtttacagtttcaggttgcactaaactctaaagcctgctttgtaatacttgcgcaataaattttaatctctacttattattgtctattctaatcacttcctgctcaaagccaatccttgcatgtataagaaaaaccaagtttaatgataatccttagaaacaataatcaaaaccgtttttgctagtcctatatatatactataacagtcttacgagaaccgtcttacgagtaatataatagtaaccacaatagcaattatcaccaaaaagaaaacaaaacagcagcacgaaccacaacattgtgtcaaatccagatcatctctgccaagaccatgaaagcaatctccagcatcggctccacattggtagcaaaacgtatgtccacatctgccatttatcaggtaaattgtgttgatacataaattcgaaataaccgaaaagagatgtaattagagatgatacctgcaaactacactgatgcatccagaagaaagttcaatcatgtgtttacacttgctgcattgacgccacgatttctcattcgctagatctcttagccttccatcgttttctgtaggatttggatgtaacgtcttgtactcgtcgcacgacaagttattatgccacgaaactttgcacttgacgcaaaagggttcgccacattttacacagcatctcctcactccaatgttaagtccagagagctcggtttccgacattaaagtcgagcacctcgggtttgggcaataaactctatccattacaggaatcaactcatctttagtcttttgctcccacatcttatttagtttaggtgttaaaaggttgccacaacgaacagaagtcagcagagaattgcaacgataatgaggacatgttatcaaacttccttcaagtagtctcacctctatatgtcgtttcacacattcagaacaacacatatgaccacttttatcaacggaaaacatctgatcagcattgatgtcatcgttcaaacatatattgcaagtttctttctgagcaggaatatctatgatgatctcagaagagattgcttctatcgcaaaatcgtaggctaaattagactgattttgagtcaacataacagggatgctagaagtcaaatattttctgatgccttgcacatcacgcagtagcaaggcaatgctttcttgcttaggagtggatattcccatgacctaaaaatatttcaaggaaaaacattaattatgagattgaagcaaatacgtgtgagccaaggaaagcttaccaattcgaaaatatattcatgatcgcagcaaattgagatatgattgatccccaaactcacggcttgatttaatccgctcttcaatgctataagctcaacctccaaaagtgtaatggtagggtcatgaatagaaaccttcaagtcaaacaacagatcgtccttgtcaccacaaattgcaaccccgaatcctgccagtaacatctctttttcctcggttaccaaacccttgaagtaaagcctgtacaaaggttttccggcggggtttaggtcatcttcctccatatttacttgaagcttctttctgaggagacgctttaccactcaataacatatatagagctatatttttctttaaaggaaaggtcagtagaaatagaaagttaggaaagaaagaaaatggaagaagatcagattagacttgtgcgtgagttttgtttccatatttgctaggtcttaggtcagtcactgactgcgcatatcacgatgcatccttataaggcctacgatcaaagaggattggaatctgcatgcgtgtttagactacacaatgtaagaacaaaaaccaacgagtgacgaacctagaaatgattttgactggataaaataaagtaaaactaattcatatgaattgatgggcatatgtaggtaactcaaagctagtggttaatagttatttggaatgaaccaatccaatggatttgccacatgttttttttcttgtagactgtttttgcttaaaaagaaaaatattctagttttcttatgccaatggatttgaagggtcgcactctgaccatatatctaagctggcacccatcaaaagtgctggtttaagaatttaataggtcttgcgaatttttttttaaaaataagttcattatgctcatatttttaaaatgagcgatttttgctcacaaattttgaaaatgggatccttttgctcacaaatttgttttctttggacttgttttgccataattttttattaaattgttttctgctcaaattattttttatgggttccttatgtcaatgaacttgggacggtcgcactatttgtgcttgtacttaagcaggaacttgtggtatggacatagggaggttttagacatagttcatctcatgattctctatatataatgacatttgattcttagttttagtctagaatttggtaacctacaaaacaagatatcaagaaccatttacagccttacagggtaaaggttcagggtttttgtaatgtttttgaaatacatgtaaaaatccataattcgtaatcatacgttagttttactacaatggaaaaagataccaccctttggcaataattgtatttgaaatcttagtggtaagtagacttacaaatgaagccaagcaaagttcaatcaatctacgatggtgaagggtcattttcattggaggtaaagtaccatattctttgtgtctaaaaaagagtggggaacaatttcaaaaaaaaaaatgattttatattgttgcaaagatatactattaatttatttattaagcacatatccgagcgtgttgtaaaattatcatataaaatattgctaagttaaaattatatccgagcgtgttgtaaaatatcatataaaatatcatattaaatattgctaattaaaatattttattcttaattctgtcatcttcattgattgttagatatatttacatattgaagaaagtaaacatagaaagacgacaaacaataattcgtcgccattatgcctttgcgccgctgaggagagcccaaagtccaaaagctttcaatgattgattggtccattatttgattccttcctaatggccgatccattcaatgctgaatgaaatactgaaaacaaatattttgaatttttaatttgaatttaaaggagtttaatgttttttttcttttcttaactgcattgaattttcaatcttttcaagttaccgaaaatttagactcggaacagaaagttcaactgtattactattaccattcttaggcatggtttaatgggtagttaaacaatcaatattataagaacagattagaacagaaaaaaaaaacaatttagatgaggcatttaagaaactaaacaattgggacatacactataactgaagtgctaaaaagataattattttgtattctcatgcatggatattctaaaaaatctgaacgggatgaaaccaaaattgtattttatttatttatttggttgaaaacttgaatgcatggctttgattgttcattatatttattggtgttaagatgtggttaaaagagatagtactcactaagtgatatttgactcatgcatttgaaagatacttataattttttaaaaaattgaattataggtgcgacactaattttctgactctctctacatgggcgtcattcaacttcttacgagttcataattaatgttttccttgtttcttgttggtttggttgaaaggttatagttttgttggttgcagtttgtatagctattttatttagaaaggtttaaagctttttcaaaaaggtcagtctcacacatatcttgtaatgtgtcgcattctttctttgcttggttttcatgttcccaggttttcttatttacgattttcgtaatcctcttatctatcatcaagttggttgttgcttttattcaatttttcaaaggttattatctttttataggttaatcaacaaatgagtaaccttgatgtacaactctcatgtgtagtgtataattggttttaaacctcgatttaatgttttatttctatgttttcttaatgcttaaagtattttttggagtcttttggttttttttttttttggagtcttgagataagttcaatgaaaagaaagaaagtttttatgcataatttagagcaattttcatcaaagatcgaaaatccagttataggaaacattgattcatcatatttcctttttcatgattatatgaagacataaaaagtattaaaaactttagactcgtttttcttagggttatcatgcatttatttagttcaaaactttttacttattatttattaacatgcacaacttattctttattttgctaattggacagaaatctgtatatcctactttaaaggaaatatagagtaaagcaaaatacgagtaagacagtgaatctgaaaaaaggaggaaataaaaataaaaataacaagagtaatttgttttgttccaaaaagaaagaagttgcttgaacgataaccagagtaaaatagtagatgattagattattttcaactcttaatttgctaaatattagctgaaatcaaaataattgtctctaactgaataacatttagcttttaaatgtttcctatcacactaatcacaatttaaactttccacttttatttttgtagaggaaaaactttagtttcatttttactatattcctattccttcctacatatttccttatattttttagggaaatttgcatttataactatcaaaaaattataaattgaaaaactaacctatgcaaaaaaatacaatgatattaagtgtataaagtgtaataatacaataatatcctcaccaccataactattcacatcaccaccccagcccagaaccaccaccaccaccaccaccggaacctctgccaccaccgtcgctggaactcactcgccgaaaaactaccgccggaactttcttaccggaaaaatcaccgccgggaaccttcgccggaactccctcgccggaaaccaccgtcggaactccctcaccggaaaaatcaccgtcggcactccctcgccggaaaactctcgttggaactacgtcgtcgaaaaatcaccacctgaactccttcgccgaaaaatcctcgcgggaaaactctatcgccggaaacccaccaccgaaactcccttgccggaaaaccctcgccggagctccttcgccggaaaccttcgcctgaactcataccaccaccaccattggtcattttttatacccttcaatgttagtttcttaattcatacatatagtatgctatattcttaattttttagtaaaaaagtgttattcttgcaaatgatcctatcttttacaagtaagaatctaaaaaaagctttgtccaaaaaaaaaaaaaaaaaaaaaagtctaaaaaaacatctccaacaaaccctgaagttctcaaactttgagatttattgaactccaacaaactcttattttttaagatagtgcactattcacatcctaaaaatatttttcatatttcattttaatcttcatacatgttatatcttacaaatagttttattaaattgaattatttcaaatatataaacacatatattaaaattaaaactgaaactatcaaaatataaaagatataacatttgaaaacaaattttatgcaacaatttcattgagtatttttgagcattatggaaatacttatattgaataattttgtattctctaagctaagatacacactatctaactagaccataatggtagaagacattgagaattccaaaatctcaaacaattatattctcgtccaacaaatcgactgtatcgtcagaatcatgttctcttcgattaatgagttggattcaacaaagtttgaaaatagtctttgagtttaatttagcacacacataatttttaatttgtgggattagaagaagtgttcctacaatttacaacaaaagatgcatttaattaatataacaaagactttttgatgaatacatttttacatttattgtttaaaaaaatcacattatgaattacaaacttcttcacattatttattttttcaattaaattaactttttgttttcaaaatttaacttaatttatattattcaaccgtaatgctaccaatcaaactaaatacttaaaaaaattacaaaattaaatactcaataacaagttttaactatatttttttatatcttctatttttaggcgctttttccatagatgattacatttaatataaatctataaatcttatcataaatggaagatttatctaaaattcattgatatatcttctctagtttattaagaaaaaaacagtgtcccaaacatcatctttcattaaaaagacatgacacttgaattccacgtgcttcacagccaagcatcctgcaaatacggataagcacaacgtatactactaaataccatcacactacatttacattactaccctctcttacaccattttttttctttttttttttgtaaacaactcttttacaccatctttgtatcacattatcactgttaaaatgtaaaatcatatattggtaatttcgtaactacgacgcctcaagaacaacaattcctctaccacccaagattcttgaatcatcgtttcgaaaatttattacaaacaccttgggtcatgtacaaagataaagattctcgaattttcattttcttgttataaagaaaaaagagaaacagttccggcaacaaaaagccagtggataatctacagtgaagatgtgaaattgaaaaaagctaaccaaaattaagaattttcaaaaaggtccataaattaatacatagttaagaaacagcctcaagagttttctttttatcaatttttcacttgtcgtttcttttcttcaccatctccttatacttagtgatggaatcaattctctgtaacttcaactgatgcttgaatcgattgataaagtcatcagcttttgcatctacttcttcatcagcttcttccaccgtcgtaactctcggcactttcaccgtcgcaggacggcgagcctccacggagatttcatcttcttgaaagtgagagaacggagatttggtactagcagattttttcatcttctttggaagcttcggaggtctaattccagcagctggttcagtgtcagattttgtcctagcgacatggtttagattaagtttactataaacctcttcaagactctgttcttcttcttcttgttcttcttttacttcttgttcttgtacttgttcttgttttgtctctacggtcaccgacggtggtgaagcttcgattatattggtgggttcttgagaaatgtagttataaagattgaaagatttgattctgtgaagaacagaaggagatctagacaagaatggttgattctgttcgattgaagctggttggtgaaagttgttgttgctgttgtcttcaggtgttgaaggaggaaactcgagatgagacttgtctggagaagtgaaagaagagaagtttatggatttgagacgatgaatcatggaaggagagcgttggatctgagtttgatttgggtcgttggatttggaagagaaagatgagctaatggcgatggtaccaatcataaggttgaggaagacgaagagaactgtcggagtgaaccaactatacatcgccgtgagtacagattccgacatatctaacatagatttttgttttggttgtgttctttgttcggagagaaaaggagaagaggaaggagatgggtgcgtttggtttttttcggaaagcaaatagaagcacatgtgggaactgggggtatttttggtatttgatgttctcacttatttttcagctttgtttttttttttttgtgaagagtgagatggtggaagacaaaggagggaagtggaacatgcttctagaatgtcacatccactacaattttgtttggtttatttcaatttttatgttcttggatttttaagaattatttgttgttttcttatggtaaaaaaatgtttcgttcgtgtaaagactaaactgagaaataaccattttgatgactagtttttaaacttgaagcttatcatttgggagttactatagagtgtctcctcggttccggcaatggtggagttaggagtcgaaacgtgtcattttatcttccctttattatatgggagaagcccaattttgagtggattgcgagctttatgacaccaattttacgattcagttttaaaatactacaacttgtttataaatgatgataccaattcgaaaaataataatttaacaaaaaaaacttattttaaggtttaaaaagggtttgttggaaatataatcaactttgggaacataattatgaaattaataacattactatttataatttgtaaaataaacatttttcactatttattatatttattatgtatactaagatttgtacaacatattaagtatttgtatgaataaatatacatattttatttatatgtacagtaaatgagttatacgaatgtaaatgtatatatttgtataattaatgagatgtacaaaaaaaaatgaatttattaaacaaaatgcatatcaaattatagagaaaaatatgggttttttgtgtagtaaaagattttttaagaaaaatatactaataaatattttaataattaaactagaggaaaagtgaaaaaaaaaaatttgggtccatcacctattttgcaaatgtaaatagtaatattattagctttataaatatgttggaaaaatgttaccattttgcaacatatctcctaaacaaatgtggtgtggtgataacatcatcaataattaaggttatgttttaaacatagcatgatatcatgtaaattttaatataattggcttaaataacatataatttgtttgaaacacaaacctatatatcccatgctatttgttaaatacagtgcgagaaatgattttttttatttacaattttttatctatcattttacgaacaaatgatcaagatatggttggtattttaattatgggatgatttttacccgttggagataaattttaactattaacaatcgacttgtcacgatttgatacgtagaaactcgataattttacgaaaatcaaagtaggatttcccacattattagcgttaagagatggtctgctacatcaatctttcaaaaagtatacgtaaccgtgcaagcacattaaaatgtaattcgtgaaataagctttcaaaagtaaaatgtaaaacatgaggatcagatactcttatcagttatcactggtatttcccgctctattgactattaattaattttgagatattttcacctaaaatgagagatatttaaggcaaccaaatgagcaatctataacattgctttagcatgagcgaattactcgaatccgaatccgaaaaacttaatccgaacccaactcgaacccaaagtctaaatatacctgaatgggttttagatttctaaatccgtaaaaaccgagtctaaacccgaccaaaatactcgaacgtccaggccatcattgctcaatactatgcgtgtccaatgcaatgtacctcaagccaaagatatccaaactctacggttcctttatgttaacattataaatttataaccattcgggcaatccgcactcattaccctaccatattacttattataatgaaattatcacataccgggcatttattccactaatgtggttcgggtaacattgttaagaaagccaaaacattcgaaaataagattttggtgagaaagttctacaatatattacggcatttatattcttgtcaatgtgtctcttctcttgtgtcctacatgcccatttgtatttttttctgtatatgtgggtttaagcccaaaactctaatgattttttcagcccaaaggtgaacatgtacatacaactttcttcaaatgtacataatttaataaattaggtagaattagaaatttttagcgtaaatttgatagaggttaaaaataaaaagtgatccaaattgagcgtttataatacaaatgaattgtcacatacatgataaaaaatgtaaaatcacttacataaaaagtgtgttacacaaaagttattgcaacggtatctaatttgacttccaagttagacttctctcttctaattggttagatattttttcattattcagatttcagatgttgagcttattttgtgtcatatactgtactcacatttaattttgtagtacttctataatacattttggggcaattgaatctcataaattgtcatgtgaatgcattcattgcatctctttcttagttctgtaataaccaaaaataatacaggaattattacataacgaatagatttcgtgtaagaagagagaatcacaaaaagaggaaaataattagattcgccacagtttcacacaccaccctcactaaaagcaaatagacagatctaaaaaaaaccagagtgaccaaaattatcccaaaacccaaacttacccttagaccaacctcagatttacgataatgccactattctcccaccgcttcaccaccgcatcttcttcttccccggcgtctccttcttactacaataaaccctcttcgaaaacccataaaccaaactcttcttcttcttcttatacttcgtctcgtattcatgtagctatcatattcttctcccttgtctctgttttcatcggagtcgccggaactatcttcgcactctcctccaccggtcctgcttctgtttatcgatgcggcggatctaaagacacttctcgggttgtgtctgcttcaagaaagctcggaggagatggtggtaataatggtgttgttgttgaaagacgaaagcttttagggtttgttgggatccagactggttttgattccggtgatcgtagaactgctttgagaagtacttggttcccttctgatcctgattctcttctaaggtatctaaaaaatcttatcttgtttattagaatgatacattgcttcaaattctgaattgctggttactgagattcatcggtatagtatgattggattttgtcacctttaaagtttgaatcttttgatatcatttcagttactatagcgattttggagttcatattctctgtaaattgtgttaggcttatcgatttgagcggttttttcaatgccgaaaatgcagctagataggattgctttgatgttttgttggttactcggaacagtgtatgtcaagcaaaggatattattagcctcacttttgttggatcagtttacatctgtttattttagatttgaatccaatgttgtgttgttgttgttgattggaactcaggttggaacaagcgactggattagcttttagattcgtcattggaaagtcaaaggatgccaaaaagatggctgagcttgagaaggagataaaagagtacagagattttgtgcttcttgataccgaggaagaatatatacgacttccatataaaacgtaaaatcctggttttggttgttgatctgtgtttccctattatttcttagtgttttagtagttttattcttatcaatgactgattgatgtcttctccttgtaggttggctttcttcaaagcagcttttaaactctttgaagctgattattatgtcaaagccgacgatgacatttatttgagaccaggtatttgagagctagtgtttcagattgttttcctctgcatcacagtagtattcaaattccttttgtttttgttttggttcagatcgacttgcgacgcttcttgccaatgaaagacttcattcacagacatacattggctgcatgaagaaaggaccagttataactgaccctaaactaaaatggtattaactagtcctctctttatccgtgactgtaattctttgttgagtttatcagttttggtgacagatactgaatttgtcaggtacgagaaacaaggcaatttgattggaaatgaatactttttacatgcttatggaccgatatacgttctttcagccgagatagtagcttcacttgcagcagctaggaatggcaggtttgaaatgtttttgatgtacctaactagcagattttgatatgcaaatctcattatcggtgtttttcatttcagtctgagaatgtttaataatgaagatgtaactatcggatcttggatgcttgcaatggatgtacatcacgaagacaaccgcgctttatgcgatccgcattgttccccaaagtccatagcagtttgggacattcccaaatgctcaggtaacattaatatgttctcacataatagcaatagcagtcacacaagaatcaattagccaagcttttcttctcaaatctttagggctttgtgacccggagagtcggttaaaagagcttcataagacggatatgtgctccaagagtccgacattacctcccgatgacatcgatcagtagtttgtttcaagagttgcccccacttgaaacttcttgagacagttctacggaatatatgatctcaccacaagcactagagttccgacatcattggagctgtatagggaaaagatgacttcatggttcttacatgatctgattttaatagttgttgttagattgtaccacatatatacactgaaactatatgttatagacagatacatcaatatccctttttgtaaaattagatttatgtgcccagtataggcactgggtgatggatgatacatcttgtttcatttgtaaaagaaatcaaattcaatctatttatttgttatattaatttttttcatcaaatactgtttcaaattttatgatacagcggagataaatcagacatgagactatgtcaaaattgcaggagaattattctaaagataaaaccgtttagtggatttggttaccaaaatgttgatatggccgagttggtctaaggcgccagattaaggttctggtccgaaagggcgtgggttcaaatcccactgtcaacataattattattattatttttttttttaaatttatatataggcttcaaatcaaacagtgacacttttttggtacaaatcaaatagtgacttatatattagagaaattgttggaaaaaaacaaatgtgatatccattgcttttgcggaaacgttgacaaattattggcgaaatggtgacttatatatttgagcaacatacacactcgtttttatcttatttttatccaaaaaggggaaagtagatgaattatgtggattttattagtgaatatgtgatgcatttcattagtgaatttgtttgtttcgaacacctaacaatcaattatgtttgagaggatattttcagggcggtcctgaggagagcaacatgaaacatttgtatgtgacctcatagtttttttcaaaaaattacattaaaatttatttgtaaataggcccccaaaaatatttaatttgaaaaaaaccttaaattgcaaaacagtttatactccctccctctgttccatcaagattgatgttataggttttttttcttgttccaaaaagtttgatgttttagatcaatattattagtatttttatttgtgaccaatatagagaagagaaaggcagtgtctgatattattaaacaaacaaaagaataataaaaaaataaaaagttatttttcttaatttgtgtgaaaacccacaacatcaaacttcatgaaatagagggagtattaatttcaaaatatataatttatggtttagaccccagattgtcatgaccgaccgttgatactttgcatagcttagaactttcatctctgcgtgtagtagagaatgactagtttggtaacctaatttacttatagatctttaaacatatagatcatttgacccaatttactgccacgcgttttaaatgtactaactactaagtatgaataaaatgatcaatttgagtcacaaaaagtatgtttattgtgatcaattgtgaaatgccaactcttttacaggtattactaggttgatgggaaatattttgctagggtccccgaccaaaccgcactaacaaaaacatgaaatttaattagaaaaaaaaaagttgcaatatttggaggacgatagttccgttgtcaaatgatgaacaacgaagaaaccgtacattgatgagataagttttatgtgaaacacatcttgccacctatatttatgtaactatgtgaaccataataatcataagctctttacaatatattttcttagttttgtttgtaaagcaaatttatggaagaaaaaaaaaattgtcgtccacatatttccaatctcttccactttgattctcttccattcaatctttcttcgaggtttaaagcattttctatgatacaaaagtataagagatgtgtatccagttgcaaaacttatactatgaattgactatactattttgataatttctataaccataacggctgcatgaactatatacttaaaactatgactacgatagtcgcaataaatgtatcgtactatccttcgaactcttatacgatttaaaaccttagcatatcaaacatttaaatttctagatagtgatatcaaaatcctacagccgcaatttttccagaaaaaggtgataattttttttttttatcagcatattgcttcgatgcaaaatacgtggaatctatgcaaacaaatttgtttcttctgtatagttgcttattgagttgagtggttgtcagtcaccaaccctcttcagatctcaaagccacaataaaatacgttaaattaataattaccaacctcaaaactataatctatatatatatatatatataatcagcattttcttcagtgtctctctactctctctcagatttgcatttgtttttttttggtttggttatggagcgtgcaaggagacttgcttacagagggatcgtgaaacgtctcgtcaacgagacaaaacgccaccgtaacggcgaatcctctcttcttccgacgacgactgttactccctcaaggtatgtctcctccgtctcctcctttctccatcgccgtcgtgatgtctctggatcggcttttaccacctccggtagaaatcaacaccagacacgatcgatctccgtcgatgcgttgaagccaagcgacactttcccgcgccggcacaactcagcaacaccggatgaacaagctcagatggcgaattactgcggattcgataatctcaacacgttgattgattcgactgttccgaaatcgattcggttagattcgatgaagttttccgggatatttgatgaaggattaacggagagtcaaatgattgagcatatgagtgatttagcttcgaagaacaaagttttcaaatcgttcattggtatgggatactataacactcatgttcctcctgtgattttgcgtaatataatggagaatcctgcttggtatactcaatatactccttatcaagctgagatttctcaaggaagactcgaatctctgctcaattaccagacggttattactgatctcaccggtctaccgatgtcgaacgcttcgttgctcgatgaaggtacggcggcggcggaagcaatggcgatgtgtaataatattctaaaggggaagaagaagacgtttgttattgctagtaattgtcatcctcagactattgatgtttgcaagacgagagcggatggtttcgatttgaaagttgtgacggttgatattaaggatgtggattatagctctggtgatgtgtgtggagtgttggttcagtatccggggactgaaggggaggtgttggattatggtgagtttgttaagaatgctcatgctaatggtgttaaggttgttatggctacggatttgttggctttgacgatgttgaaaccgccgggtgagtttggggcggatattgttgttgggtcgggtcagaggtttggtgttccgatgggttatggtggtcctcatgctgctttcttggctacttcacaagagtataagagaatgatgcctgggaggattattggtgttagtgttgattcttccgggaagcaagctttgcgtatggctatgcagactagggaacagcatatccgcagggataaagctaccagcaacatctgtaccgctcaggtaaaaatggcttcaaactctataggatttatgtagtgtataccgctttgactattactgataagtgataacaaaagcgggaagaattagaggtaccgagagagcagtaccatattttacatcttcaaactattttgctattgattatcgttttctacattgtaggccttgcttgcaaatatgactgctatgtatgctgtttaccatggaccagaaggcttaaaatctattgcacaacgggttcatggtctcgctggtgtatttgccttaggattgaagaaactgggaactgcacaagtccaagatcttcccttctttgacactgtcaaagttacatgttcagatgcaactgcaatttttgatgtggcagccaagaaggagatcaatttgcgtcttgtggactccaacactgtgagtttcttcatatatatatatatatatatatatatatatatatttcttcaatatctggatatgattattaacattgatgggttttttttcttgttctttaagattactgttgctttcgatgaaacaaccaccttggatgatgtcgataaactttttgaagtttttgcttcgggcaagcccgtgagtttactttaagctaatatccattcatctcgcttgttcactcttttttttcgtgtttgcttaaaataatgttttctccaatgtacaaggttcaattcacggctgagtctcttgcaccggagtttaacaatgctattccctctagcctaacaagagagagcccttatctgacccatccaatcttcaacatgtatgttaccttctttaaatcttggttccttcattgccctgtggcttattgttaagtacctcacatttactttcccttttttcttacatttggttaggtaccacacggagcatgagttgcttaggtacatccacaagttacaaaataaagatctatcattgtgccacagcatgattccacttggatcttgtacgatgaaattgaatgccaccactgaaatgatgccagtcacatggccaagtttcaccaacatgcacccttttgctcctgttgaacaagcccaaggttatcaggtgaggccacatatttgatttacctgactagaaatttaactacgtactgaattttttgtttgacaacttataggaaatgtttacgaatttgggtgagctcttatgtacgatcactggattcgactctttctcattgcaacctaatgccggtgctgctggcgagtacgccgggctcatggttatccgtgcatatcatatggtaagcatacctgtagtttcttgttttccaatatgaactcgcacttcaacaaatttggtaaatgggtgaataaatgatgcagtcaagaggcgatcatcacagaaatgtgtgcatcatacctgtttctgcacacgggacaaaccctgctagtgctgccatgtgcggaatgaaaattgttgccgttggaactgatgccaaaggaaacattaacatcgaagagttgaggaacgccgccgaagccaacaaggacaacttggctgctcttatggtatgtatttacttctttcatcactatagatgaaacaatgtcacttttgggtcaatccactttctaattctacaacttctgtttgaatattaggttacatacccttccacccatggagtctacgaagagggtatcgacgagatctgcaacataattcatgaaaatggaggccaagtttatatggatggtgctaatatgaatgcacaggtatggtttctctgctggtatgttgactgaagaatccaaaagttgtgaatttgagaaagtttttggaacttccaggtgggtttgacaagccctggttttattggagcggatgtttgccatctcaatctccacaagaccttctgtatccctcacggaggtggaggtcccggaatgggccctatcggtgtgaagcaacatttggctccattcctaccttctcacccagtggttagtgttaattcttatatgttatgatcgctaatccatctttctcaatgattgagttatctgcttttttgtactcattctgtttactctgctacagatacctaccggtggtatccctgaacccgagcagacatcaccgctgggaaccatttctgcagcaccatgggggtctgcgcttatcttgccaatctcgtatacttacattgccatgatgggatctggaggactcaccgatgcctcaaagattgcaattttgaacgctaactacatggcaaagcgtctggaggtaccttatcttatcttgacaactctttaaagagagtgaacgtctcttctcttgtgcaacctcacttatgctttcttgtctttcagagccactacccagttcttttccgtggtgtcaatggaacagtcgctcacgaattcatcattgacttgagaggattcaaggtatgtttctttatctcgtttgagtaaatgctctgttttttggttgtacatgctaaatcaatgtcttgttcaatgtcctcagaacactgctggaattgaaccagaggatgtggccaaacgattgatggattatggtttccatggaccgacaatgtcttggcctgtccctggaacgcttatgatcgagccaaccgaaagcgaaagcaaggtaattatgtcttgcattgcattgcaaatctctcactgactcagctctcagtctctaaaacatggcttcataatttgtatatatatatgtaatatttcaggctgagttagataggttctgtgatgctctcatctcgatcagggaagagatttcacagattgagaaaggaaacgcagatccaaacaacaacgttctgaaggtaagaaaaaatttgagaccacaatttcagttcggactagccctctagtctgatactaatgaactttaaaaaacaaacacacacagggtgctccacatcctccgtcattgctaatggcagatacatggaaaaagccgtattcacgggaatacgcagccttccccgctccatggctccgctcctccaagttctggcccactacaggtacttgaaaactaggggtggcatttcccatagaaaacaatttgttatttgtaaatcgtttcaaaatgtattaaatatgtgtgaaacagggcgagtggacaacgtgtatggagaccgtaatctggtgtgcactctccaaccggcgaacgaagaacaggctgcagctgcagtgtctgcttaaatgaagccactatgaagcgattcgcactcgcaccaaaacccacaatggggcgattcggactcataccggatccagaaacgtatctttactggcttttacttctcttcccagcctcatcatcactttcactttcacttcctgtacaatgtacatacgtagtcctaagttcttccctcatttatttaataaaatacatttctttatgttccactttcttatacgtataacattccatttggatgatgtgatcaccatcgtggttatatttatgccatatgatctctttgaaaaaagtttgaattcttaggatatttattgtttcattttataattaggaaatttggcaaaataaccataattctaggttttataaacaaactgactgacaacatataggttctgaatggttgcatgtagagtaaaaagtggaagtgaaggagacaaaaaaatttagtgaaagaaacaaccaaatattaaaggaaaggaatctaaattttgaagtagttattttttctctctcctttgggtagagttagatttttttttataaaaaaaagcttaataccaacttgaacttcctttccaaagaaaactaggaacttggtagagttaaaatttaatttcacttttctacattttggccaaaaaaaaacaaaaagcagttctaaccaatgctaatcttttctattttagagacacacattggaacaaaatcaactctaaaatagtgaaaaaaaataaaggtaggacatgggagatgctcttatgtttctgctaattttttcaattgccactaatcagacttgtagcattattctactaaatatcagattggacattagatcacctatactaaaaccatctccaatggtcacctctataaatagaggaaaatatagaggtcatcattagagatgccctaagtccttgaaccaaaacctgtatttcctcacagaaaatagattttctgtatagccacattaattcattctaactagactctcactgaatctttgagaggaccaacctcataatgattttttcctatcctatatactaatgcttgtttttttttttcttccgaaaggtgattaaaggagcatattctcatcgagccctgttcggttacctctctagcaaacaactcatctatcctacgctttatcactattttagagcacctgacatttctcttaagaacaaatcaaccttgtaaagcatatgtggcttgattcaaaaagacaaacactagtgatagacgcaagaaccctaaataaaaaaagttttctagattctcaaaaccgttaggtctgacagacatatataaacaattatcgaattgttattaattaatacgatgtcactctatacctataatagagattagggtttccatgtgttcatttatccaaccataattaataacgacaacggtaatcaataagacacattaagattgatcggtcaagagttatgagtttcataagtcatctccaaattttgcggaaactaaatatttaaacatcggattctctgtttgtcagttgtcagatcatctgactcgcatgcacatgattcgtctcaaaaaggcaaacacgaatgatagatgcaaggaccctaaatcaagaaagttttctcgattcttaaaaccgttacgtccgacagaaaaacataaacaattgtcgaattgtcataaatacgatgtcactctatacctataatagagattgaggtttccatgtgttcatttatccaaccataatgaataacgacaacggtaatcaaacacgacaaattagaaataatcgttcaagagatttgagttttatagattgactccaaattttacggaaactaaatatataaacatcggtttctttgttacaaaaaaaaaacattggattctcttcagtatttgagcttttattactgaaaatacaaattttataatttcgtagctctggattctgatagtaaaactgcaattgagaaggatattcaaatatttcaaaattttctagtaaaactgcaattcgtagatcttttttttttgttcaaagttttgataaagcaaacgtccctttttccttaaaataattaacttagtatataataataaaattaagacagtgcagtaattgataaacaaccaaaggttcattgtacctttctccattgtcttcaatgaattcctaaaactagaagaagcgttactttagaaaaccaattataaaaatctcctctttcttcatcaaattccacaaagcatcagtttcttctccttctccaagctctcgcatcactttcatcgatttttcctctctgcgtcgatccttcagacatcggcgtcggagtttccgacaggtaaatgtaaaacacagtccactgttattccctgcttcttagctttccattatgattttttgttgtgatttttactgttttctacggaaatgcttttgatgggttttgtttagtttccggtgaaatttacagagaaacccacaatgctgaaaatctgaattaggctcaagttaggagattactacacaattagtgctgtgagaatgaatatacggacatgctttgttaaaaagattgaaacttttgcttcattttgatcaaaagattttaactttcgattcttttagtaaatgggtcgctctttgtttggactataatgatcagactgctcttgtcttgtgtgattaggaatctaaaaatgtcacgtggaagaggagttcctatgatggacctgaaacgaagttatgatgttgaagacagggtggtgtccgtgtctataccatcaataatcgaagctgatgaggctgatctgtggccactacctgagattgataccaagaagtcgaaatttccttgctgtatagtttggactcctcttcctgttgtctcttggttggctcctttcattggtcatattggactttgcagagaagatggagtcattttggactttgctggatctaacttcatcaatgttgatgattttgcatttggtcctcctgctcgctatctccaactcgatagaaccaaggtattagtatctgcttctttattaagtagaatctggttatgcatggactttgttagttttgtatcaaattataagaactttttaatctttatcaaatgtgtgtgtttgtggcagtgttgcttaccaccaaatatgggtggacatacttgcaagtatggattcaaacacaccgactttggaacagcgcgtacatgggataatgcactgagctcgagcacacgtagctttgagcataaaacctacaacatcttcacttgtaactgccattcgtttgttgcaaactgtttgaaccgtctttgctatggtggctcaatggagtggaatatggtgaatgttgctattttacttatgatcaaagggaaatggatcaatggttcatcagtagtccgctcgtttctgccatgtgctgtggtcacgtctttgggggtggtgcttgtcggctggccattcctcatcggtctctcttcgttctcgctactactctttgcctggttcataattgctacttactgttttaagaacataattacttgaagcagtatgagagaaatataaatatgatgtatcaccaaaattatgttaatcttaagaattgttctcttttcctttcggcaccatctagctttcaactccaaaattatgttaatcttaaaaaattgttctctttttcctaatccgtagattatttagaggtgatgtgtcatagtaaaggaaaaaaatatacatattcggaggcccttaagaaaaaaacatacaatatccaaataaatgtattgttaggtattaacaaaaagaaaaaatattgtaagatcttacaagcacaagcagcaaccatatgagttgcatctaaatttgctatttatatggaaaaaagaagtttctccaaagttgtacgatatcagctatgtattttttgtttcgtcaaaaagttgtttattaaattccacaaagttgtaccaacagtgttaaaacttaagtgatcgtagtaaaagtaaaacagaaatcgtatgaaacatcatggagctaatcttgtatgacaaaatagtatagagttctcttctacctaaaatgttatgttgtttacagatagacctcagaaaaagtaaaacaacacaggagtttcagaacctatccaaaccaacagcagtcacggtttagttgcaagctgccaaatcttgaccatcccatcatcactagccgacgcaagcaaccggttcccctcctgtagcaggttacaattccaaggtcaaaatcatagacaacataaccacatgtacttgggccaatgtaagtcgagtaatcaatggcatcatttctctgatcctaaaactaagcttgagtattatgttctaacttctaattcacatttataagatgccatatagactatacttaatcattgcaaccatgtatcaagtacgaaatagtatgcacttgtgtctattacttcataagaaacatggaacttacaccgggtgaccattggacagagtttacatcattttcatgtgctttattcttcttcagcaaaagattatatgaaggtccatcaacctggtacacaaaagaatgactttaagttcaaagatgaagcagaaaagtttaattgtatagtggtaaaccattggcaagactaggagagatagaatctgctgcctgcatttggtttcttgtattgagatatgtaagttaggcgtgtatatatggaaagatattaaccaaattcaacttacagagtcatgtttgctgtccacaaacaaccgtatagcattatcgcctgctccactggcaataatgtcgtccctgtcaaaaatttaaaataaaaagaaaacaaaacaaaactgagtttaaactcagcacagtctcacgaaagagcattaaaaatcccaatttggatgcattcgacagatgactgggagcgtaaatatcaggtacaacaaagagtttttccttttaggctggcagatttagaaattaggcagagttacacgatgctttaaagaaaacatgtgaggtgtcaataccttgaccagtgagctgagtatatggtacggtcatgatagccagagagagtacaaagatgaatcctgcaaagtccgagcaagtaaggattacattagtcaaaattggacggagaaaaattcttgaagaagtcaaataatcttgtaggctacatactacgtccagctctaaacgtaagaaacaaataaattcgattacatgtaataacccactattttctcaccaaggtgcatattcttcaccagactgcatcttggcaatatctgtcccccatatcttcaaggttagatcatcactgcaaatacacattcaggcaagcttgctactgtaagaacaatatcccaagagacagattacattgcttctagaatgcctatgggagacaaggagagaagattcactaacctacaagtgaccatcttgtcccctgcagcgttaaatgagatggaccataccgttgaagagtgaccgctgtttgaagaagaaaggcatatattaatctactacttcaaaagtaagagcctaataagaaaaaaatcgaaagcatataagaaaaagtagaagatatacttgttagattcacctaaggtttggacacattgatactcaccatcatcatcttcagaccaccaaacctgtgagtagcacgccactagcgttattcaattatataatttttttttttttgtgtaataaatttcaagttctgcattactaaaacctaattagagtattcgcattaccttgatggtgttatcataactgcaagaaaataaaacatccatggtgggatgccactgaaccatcttcacatcttgtgtatgcccagttaataccgcagcacagtcatattcattcccttcaagcacttcccaaatccaaacagacttatctctactacatgttgcaaggcatgaaccagatgcattccatgatacacttttgacttcgttttcatgtccctacacacattttttttaataagattctactagccaaaaacgtgcgatacaaagcataaagacagtacaagaaaaccaccaaaagctttgagcataattaaatatgaactatgaagtgaacactgaaaaactccatgagagtttgagcttagcattaaagatcaagaaagaacaaagtcaaaagagcaaacaggagctgtgaaaagttatgctttcaggttcaaagaactaattctggataagaatttgacaatttgtggatggttcaaggattgggctagaaagtacctccaaagtggaaatacactcaaactcagaaccgtaattcttccaaatgccagtggtaccatcaaaacttgcagtggccaataactgtcctgagggtgaccaagcgcacgacctcacagttcttgtatgcgtctcttccaaaactgtctgaagattcacaatatacaatcaataaatctttctagagaaatagcacaagaactaacacaacagtcctacaccatatccaaatcaccagtcgattccatgtttaaggtcaagttaatctctttagtgaatcgaaacaaaacccacaaattgtaatgtaagactgatctagagaatcaatagatttttgtgaattgaacttgctaggtccaaaaaaggctagaactttcttgcgagaaagagaaatgagatagagaccttgcaagtccaggagcgagagagagagctttgttcccagattcgaacagtgttatcgccactgcaagaagcaagaatcggtgaaacaccgtcggcgtgagaagaaacggggttccaagctacgctccaaacacgatcggtgtggccttctagtttctgaatctccactaactccaagttcttctccatcaaatccatctatgacgctaggctacgagaaggcctccagaaagttgaaaggagtaagcttttagggctgagcagagattgtgcaacaggtgacctgaaactatatatgattcaattcggtttcggtcacaagtaagcctaggcattcgtgatttgtgtatgggcatgggtttgggtctgggtttgagttcggtttgggttcgttattttttaatggcggtacaaaaataaaagctagattagaggtttaaactttaaagtgtttttaagtaaaatcaatttgatttctaattttatttaattagttttatttactaatattaaaaaaaaaatattttcaaatctttgaaagaggttgaaaatagatattgaggagatttttattctaagataaattttcatttctaataaaaaaaatattaacaagctaattttcttagaactcgaaggtcatattcttaaatttatttttcaaattaaatcattaggttttttgttcttattatataaactagtgctagcaccgcagatgtacatttaaattaagttaaatatatgtctttaataatttgttaccttttaattttgattagcatcagcacaatattatctattttatattctagtaaaaaatatgtgtttttagcctgattttaaataccgctaaacatcaatctgggattaggttagaaatataataatatatacagtaaaacctctataaattaataatgtcgagaccaagaaaatttattaatttagagaaaatattaatttatcgataaattaataattattaatttatggagatattttacaaattttgtaattttttacaaaaatttgatctaaaaggtagtttctctatacaatcaataatttttctaaaaatcaattacaagtagaaaaccattattagatttaagaaaaaaaacttttttatacgtagtaaaattattagaattaaattttacaaagaattaatataaattaaagaaaaacaatactaaagtcatattttactaagttttacatgatatattcataaatataaatatatatatatatatatatattcataatttatacaattattaatttataatattgatgggaccatatatttacataggattttcaaaaaaaatattatcttattaatttatcgatttgtatcaatttttacactgatcccaactcgggaccggaagaatttattaatttgtagaggttattaatttatcgtgtattaatttatagaggttttactgtagattcaagatacttttgtttgctgtagtggtttgtttaatatatcatgtcagaggtgacaggttcgaatctcaaattcaacaatcaacagtttgaaattttttcaatttatcttcgaagaatggtatattggtcatttagtatccatcttcttcttatgaatactaatcctccaaacctaatttatggtcgctacgaattttttgtaatatttattttcatattctttgattttttgcactcaaatattgttgatccatatagaaaagtgagtttctaacatgtaacaaacaaaaaataataagttatgttacatcgcggcggcttcaaaccatctcatgctttccgacgtctagagacctcggtctccatggccatgttttagaacaaagattttcagtaatttattatctttattttgactagtaatgacttactaggtactaaatccctataaattaagtaatttcttttgcgtatttagtagtaaattatctcaattttgactagtgatatcatcatattttaaaaatttaagttaaacaaaagttatgtgtcattagtaagttatttactaatacttttgactgttgtccgcgctgtattatctgaattaaggaaaaacaaaatctatatgtgaatatttaaaaataatagttaagagcaaaattaatggttctatttccttaatacatgtaaatgtaatcaaaagtgatatttgtatattttctttagatctaaagtatatgtctagtttatgttaaatgttttcttattatttttagattttttattcttgataaatattattattagattttttactttaaactttaaaaagttaagtcacaagaaaattgtgatttccttactttttgaatgttattgaattatatttccttgttaaatttgacttgcagcactaaggaaaatgatctaatttttttaagaaagacaatgatgttttctttactaagaaaagtgaaaaacgttgaatacaaaagagagggatattttggtcaaatgagattagacatattctaagagtagtagcttataaaaagccatagaaatcacataaacgtgcattcagaatcaaaatttcaatcttcactgtttgataccaaactccatcgttttcattttcctctaaacgtcttcagccaaggtatatatatttctccatttcgttaatcttaattatggttgtgtgtttttttttcttcttctgatttctcatattgatatctcactgatctgttgaaatttgggggataatattgttaacgggtgaccaatacagtactacagttacatgaaccaatatagttttgtaacggacccaaattcttgcaattttgttgaatacccttttgttctcatatattaaataaaaaatttgatttattttcgttcattctaaggtttgagaggtttaggccttggcgatgattgggccgtcatgtttatcgtatagagagtaggcctgttcagaaatctttgccatcaattacttactttatgtactcgtcgttggtctggaatttgagtctaagctcattaataagaggattgacaaataaacaaacgttttgatacgtatagttcaattttgattttctaatcatccaagtatccaactattttctatttggttttcttatgaatttgtttattgcataatttcttgatgaatgttgttttttggttaatgttgaaataatttagcttgagagaagcctaaagaaaatctaaaatgtgtgagtcaagcaacaaagtcagagtatcgccatacccgcttcggtcttcgaggaccgacaaacacaaggcgtcagagtcgcctattgagacaggttgggaggatgtgcggtgtgtaatctgcatggaaccacctcacaatgctgttcttttgacatgctcttcttcttctagtggatgtcatccttacatgtgcgatacgagtgttcgtcactccaattgtttcaagcagttccgcagaaaaaccataaaaaagcgcctataccccaagaccttacattgtcctctctgtagaggtgaagtatccgagacgacaaaggtgacgagcactgcaagaagatttatgaatgctaaaccgaggtcttgctccgtagaggattgcaaattctctgggacgttttctcagcttactaagcacttgaaaactgagcatcgcggtattgtgccaccaaaggtcgatccactgagacaacagagatgggaaatgatggagagacattctgaatacgttgaactcatgactgcagctgggatttcgcgtatggctgaggtgatgcaacaacagcttccccaggatcagaatcatcctcatgtgtttcaagtgaccgttaatggaaccatatggaatctaattgatccgagtcagggaaggaatggattaggcatcaccaactatagcgcaatgcagtttgtaccattaagcataaatcacagtagaactctgtgaagaattctaacttgtttagtgaaaacccaagtttaaagttttgatgatctcaatatcttactttcattagttgggatccataatgtttagaattctaatatttaggttgtctttctaccaatatttttactgcatttgttaatacaaacctccacaatttaataatgttgggaccatcatattttattaatttataatgatattaaatatttattattttagagtataaattattatttactattttatcgagtttagttttaattgttaaaattttaagaaaatatgaactcaaaaaatgtaatctaagaaaattaataatgttgggaccatcatcttttattaatttataatgatattaatttatcaataaattagtattttttattttagagtataaatgattatttattattttagtgtataaattattatttattaatttatggagtttaattttaattgttaaatttttagaaaatataaattcaaaaaaatgaatcttaatattttggattttataaaaataatttagttttggacttgacaatctaatatttagaagaaaatataaaatatttacatagagattctaaaaattattattttattattttatcgaattttgttcattcttacttgagacggaaaaatctttttttattttattatatttattaaaaaaaaatcaagaattcatttgtaaataacatttaacggtctataatagttgatccgtaaaatatacattttattcttaagtcctcttcaatgacgctgcgtgaggaactaataataattaaaaaataaaaaataagacacatattatggttgaaatctgcttggattcgttaagtaattacgggtttaaattaattattgtatccttggaattagtaaagtctatttgactagttgttgccattttaggctaaactttcctttaatgagtaaaatagaaaataatgcataagatgaccaataattgatcagagcttagggttactttattaaatgctataatttagatcgaggactacatattctatttatgggctcatggcctctctacaaataaaaccttaaaggctaaaacaactaatatttgataaaataatgttctaattaaatagttattctaattattatttgctacatttgtatcaaagtagataatttcagattataatttttttttaatatataccaaaactttaaacatcaattactaaaactttaattaatcacttaccaaaacaatttatgtatacaaccactttaaaacatcacttacattgaaagagagttctacaatattgtttgcatttgctctaattcgttacgtaagatttgacttagataattaatcacctcgttaacgacaaatggcatagtctcattaaataattgtagaaccaacttatttaaagcactattcaactaataaaaagacctatggcagaaagaattactccttattgaataacttaactattattgcattaaatgaataaaatatcaaataaaacgagacaataactgtttctaaatatatcactaattatgaaatagagagagtagtgtatgttttaagattttgtaaaaatactaatctgactactttttgtaatcaacaagcttttatcttagttaagagcaatgttatatagcttcacctctatcaccagtcggattctaagcattgtatagcttcttcatattttgtttaagaaacataaacttatcgaactggaattgcccctcgataagtttcttttttagaaaataagcaactttcctatgattatatcatctcttctccatagaattcttgttagctaccgaaaaatgattaaatcactccttattaccaaaacatattacattggatctataacttgtaattgataaattctattaaatttcaaagaaacaaggatctttaagacataagaaaaacaattgtaaagaaataaaaataaacgataataagtttatatcataaatttatttattttacattgaaatgaaaaccatgaaataaaataaatttctctgaaatattacttattatggaaggagaagatattttagttcacattttatatttgggtactgtatcaaagttatacccgaatcgggtttggctcggctcgttgttcaagaaccataaccgtaaatgaagacaaaatagttttatggatagttaaattaggtgctttctaaaaatgatcaagcatcgaacatctattatggtaagacctaattattaaatacatgtgcaatacagtgttaccgtcccactaaatcaaggaataatacagagaattttgttaactacaagacaaaataacccagctctgaccaccacctttctttctttttttctttcgagacccaaaagagtggtgaccggatatttatttaatattttgtcatttccccacagttttatttaaatttataaaataaaatattggagtaggtccatcaatttagttattggattttgggaggtggttggaccaagtcttaatgtgtagtgactgttcattgaaaacataattatatgccaatgttaacattatgtattaactgatttaaagtttactaaaaccacctttacaataaataaaatttcacttctagaaataaagattgttttcaccttataggttaaagatattgagttcaatttacgccaatgtataaatcctctacataaataagaagatggaaactctttgacaaaatgggcttataaataagaaatgatctagtttttgtattccctcttgtttaatatttttacccacaaattaagaaagcataaaatattcatttaattgttctctttacataaaaaaacattattaattaaactgaattcaactaatataaaaaatgattgtaaaatataattggtataaaaatgcatttaatttgtataaaaaattgaaagcatcacttaaaatgaaactttttgtttttgctaaaacatcacttaaaatgatacgggaagagtataagttagaacaagagttaatatatggacaataaacaaacagaaagggataaatccgtccaaagaacaacacccatagatttgtagtaatatataaaaaaacactcatagctcccaaaaaaagaactgtcttttattctcatctctttcacaaaccccccaacctccaacaagaagacctctctttcataaaaccctcacacgtgtgactgattcatcaccatgagctcatccccggccgtgaaaggcctaaccgatgaagagcagaaaaccctcgaaccggttatcaaaacgtaccaccagttcgaaccagacccaaccacgtgcacttctctcataacccaacgcatccacgctccggcctccgtggtttggcctcttatccgccgcttcgacaaccccgaacgctacaaacactttgtaaaaaggtgccgtctcatctccggtgatggtgacgtcggaagcgtcagagaagtgaccgtaatctccggcctcccagcctcaaccagtaccgagcggcttgagttcgtcgatgacgaccaccgtgttctaagcttcagggtcgtcggcggagagcaccgactcaagaactacaaatcagtgacgtcggtcaatgagttcttgaatcaagattccggcaaggtttacacggtggttcttgaatcttacaccgttgatattcccgagggaaacacagaggaagacactaaaatgtttgtggacactgtcgtcaaactcaaccttcagaaactcggagttgccgccacatctgcacctatgcatgatgatgaataatttcaagtttatttcttatattttctctcggtaagttttttcctttcttctgatgattattgattatttacttaatttgtgagatttactattggaagcaaatgtttaattcgattccgttaacgaaactattgttgcataacgcatattagttctctgtttatttttttccaataaacggcaaatcacgaattctgtcatttgattttgctttttcaccatctatttttgaataaatttggactatttttgaataaactttggactatttttgatgatgtcaaaaattggtattacactcttaattaatattggttatagttggtctatagtatttgcgctacaaagagtcaagaaatcttgccggttatcaaaaagcaaaaaggaacttagaaatcacttcttgtcgcaatgttgaattagatttttatttaccttaccaaaatcattcttcttcttcttcttattaggttaacgttttttagggcacctttgaaaaaagtttatacatatatattccgatggtttgtgtctccacaaaacttgtccaatacattttttttcattaattatagtcgtcttaaaacattggaccgttgtgatgtgtagtctagttatttgtgttgctatgtaattgtatcacacattcagatttggtcccctttactatgtgttattaaaaaaaaaatggtaagaattgcgccacagtagttccagttcaataaaaataatataattttttgtattacaagaggaatccatggtctagattcgtgtagaagctcttttgcctttcacttctttaaagtgctggaaaagagaagtgtgtcacattatgcatgcagccatgtactacttccaatggttgtgtctccacaagttgttttaccttttcaatagaaagacaaatacagtttttctatttcgcttgattttctttttctttttcctccaaaattgctttaaagtaaagtatatctaattgacagtaatctttaatattcagaaatatatatactttatattttcacttggaattggaagtatatatattacatattaaatataatctaactttttatttataaacaattaaaatctattgttaactaaatttagtttcatatttaaaaaatgttagaattatatttataaataggtttttaagacatagttttttttttaaacattataactacatattataactaattatgatcttcttctaacataatttattatcttttttatataaaaaaaatctctttacaaattttataatcaatatcttcttaaaaagatagctaaaatccattttcttggatacatattatttttatttaaaatatattatatttaatagtatcaatagtgttaaagatattatatggttttgaacattataataaacatgtgataataaacattatagtaaaatccttccaaatggtcctgaaccgagtcagcatccagacaaactatgttcttcggtttgatatcatttgagtactgagtagacattcacattttgggataagaagagttttttttcataaatcgtaaataagataagaagatatcaatgggcttattcaagcccaattaggcccaatccccgatcgtatcagataacaacgccggcgacggtgacacgttcacattcacattttgggatcaattttgaaactctactccgataacttcaaccataattctccggcgagtcagatcgacggtgagttcttcagaccaagctcgattacatgattgtgtgtctgattttgggatcagttctgaaactatttgatactttaggattttgtttcttgcgatgaattgcgatagaatctgcgaattgccagattctttactaactcaagtactctcataccttccgaccatagattccgttaaaacaagcgttttatcgaaacgatgggaatttctctggcttagggttcctgttctcgacttaaaagtcagcgatttccctgacgaaaactacgcaagctttatcgacaattttctcgagtttaatcgaaaatcacgaatgcgaaaattcaagttgaagtatgatgaatacacttacgacgatgatcggttagctgggtgggttgtaacaacggttgatcgcggaattcaacatctagatgctaaaggttttgagactaatatgtgtgtaagagagttcatgcctcagaatatttataagtgcaatacattggtgtctctaatgcttgtaaccgtaggaatcgagaatccagagttcgttgtttcactaccgtctcttaagataatgcatttagaagatgtttggtattatgatgatcctttgatcatggagaagattatctcaggttgtcctgttcttgaagattttgtattgattaggcctattgatttttgtaatctagatgttctgcagtttcttcgtgtgaggtctctgagtcttagaagctttcgtcttacgtttgagtatagtgtttcttgtacgtatttttcggttgagattgatgctcctagacttgagtatttgaattttaatgatgaccaatctgatacgattgtagtcaagaacatgacttctttgtcgatgattgatattgatagtgaatttaatgttaagtttggcggcagtcgtttggaaccgggggatttacgcaagagagatatcatccgtgattttttaaccgcgatatcttgtgtaagacatatgatcatctctcggcgtactttagaggtgaaatatgtattttttgatgcatatatgtgacaagaaatgtactttgattccctgtgatgtatccttttctttctttattgcaggtcctagatcgatattcgaagttggtacctattccgaaattcgataacttgtaccgtttacaagctgcggtttctcgatccatgttgcagttgttgcttgtctttcttgagagctgcccaaatcttgaaaacctcatcttggtaagattatgaataaatctatgatttggttagttaagaacatctctgaatatattgtaaacacagcgtgtgcacctgcaggactttactgtttcaacggagcctgagcaagatggacttacctatgtccctcagtgtttgttatcgagtttggagtgtgttgagattagagaattgattatgggagaagaaaccggggagaaattagtgaggtattttctcaagaattcagtagttctcaagaaactcattttgcgtttagaagattcttcgatagcaaaccaagattcagatatcttcaaggagcttagtactttcacaaagcgttctcgcagctgtgaggttatcatcattcattgacaatgtttatagaagatcattgtagaaatcttttgttatgaaaaatttgcaattaggcttagccttttccagacattggtgtggataatattaactgtaaattgtattactttcttcacttacttgtaagatgtgattatgattgattataaaagcaattaaattacgtacgaaatacgttaagaaggattgttttaacgactgaatagtgttttttatttacagaatggaaaattacattaaattgctaccagactatagacaagaatgtagacaagaagaaacaggtctggctttaataacgctttctcttgatatgagaaaatttagttggtgatctacaaaaacatccggatcttgagttttttttttgtataccgtaattcaactttttaaataatgtttaatttcttcaacgtagtcatgagataagctattgaattgactctatgtcgagtgatttaacttgaacttcctatgaaaacatagaaataatttctttcttttgacatattccgaagataagggtgatgatggcagcaaacttatccatgataattattattactttgcttcaatgtatgtgttatgtaaagaaataagcttatattcaacctttatttataatgaaatgttggtgagtttattttctacttgtgagctgtacaataacgtggtaaccccacaaattacacacacaacgtctgctcgtagctgatattaaaagataagatcttggcttattaatagttgatggcttgtttctccaccacatattttttctctgtcaatgtctaatgtatcctaagttttattcaaaaaaaaaaaaattgtatcctgagcggctgctttggctttgagctaatgctacatcgatcacatgcatgggcggctggttaatctgactcggacaaaattcaagaaaataagatcttaatcaaaaaggtaggtaaaatgtaaaaacttaagattgccatagttagacaagtttattgatatgtccgagattttcacacttaagaaaagtgtagttcgtagtctgagtcgaataaaatacctcggaagtaactttgtacaaagttcctgaacggtaaaattaaaccatatgacaggagcaagcaggtaaaaccaagcggtcgaatgtttccggttaaagcatcaccctaattagactgttagacatatatcgtagtggactatgccatgatttggtgtgtgttttttttgccaaaattcaaacatgtttaggttttaattacaagactgtataacctatggatttggtccatggcaaaaaaagttaaaaagcattgaagcaaagataatctgtccatcaacatgatttggttgatctcatcatcgtagttcggccaagtttgcaaaacaagaaactgctctagaaaattaaagttttccatttacattttacggggaaacacctttaactgaaaattggattagtcatcaatgtgttgctctcatcggcagtaggttttcaaactagcttagttggctatagataaacaaaccgttgttggtcatggctatgaatttagagtacatatataggcaaaatgatatgatatgaatttagagtacttttgattaataaaaattaattttaacaaaaaaataatatggattctattatatattaataaagtgtcaatttcttgtgagagatacgtactatgtccttaaaaaatagtatgtataatggtcgtgttgtaaccaaatatggacaagaaaaaagtcctacgtcgtacttaaattttatatttttatagaaaagtcacaccaaacattaaaacataaacatgcatgccttaagtcactcatagaatgacacagacttatttttaaaaatataaatacacatcgataaagaaccaaagaaaattggtaaattaacatgggacgtaacagatacacttgtgagctgggaagacatagttgcaagatccatgttttgctccttcaaggttaatgcactgattcttgcatgcattgctgtttccgcaaactcctgaccaagtaccacttggcttctcgcacaacttctgtgcttccaccattgttggtacttctgcgtatgttacatctctctagttatgtaaatgaacattacattttaattcatattataagagcattactaaccaaaagctgcaaagagaacaagagcagcgtagataaaggtgatgatggaagcaaacttagccatgatgattattactactttgttttcaatgtatgtatgtatgtgttgtgtgaagaaataagcttaagagatcaacctttatttataatgaaatgatggtgagtttattttctacttgtgcatggtacaataacgagctaattgtaccccacaaattaaacacaccacgtacgccttctcgagctaatattaaaagataagatcttggcttattaatagttgatggcttgtttatctaccacatatttttctctctcaatatctaatgtaacctaagcggctgctttggctttgcatgggcggctggttaatctgacttggacaagatgcaagaaataagatcttaaccaagccaatagttacacaagtatattaaattcagagattttcacagttaggaaaagtgtagttggtagtctgaccttcgtcgaataaataccttgatagtaatagtgtaagctatttcataatttgtgcaaaatttttgaaaggtgaaaactatatatatgaacaagataaaactaagcggtcaaaattttccgatttgagcatcacccctagacatacaacataagggactatcgacatggtttggttgatctcaagagcagcatcgttcaaccaagttttcagaataagaaactgcatgctgtcgaagtttcccatttacattttaccaggaaacacctataatcgaaaattggatgattcatcaatctcttgcgccggtggtaaattttcaaactagctaagttgctatgtataaacaaaccattgttggtcgtggctatgaatttagggtacataggcaaaatgctatatatatatatatatatatatatatatatatatattgtgagtagttcttagttatggaaattcaaacaaatatggatccgatgaaacagtcgtatgtagtataaatactattcggagacatgaaacaaactgttatcgatgcctgatgtatgtaatgctcgtcccattgtcccatatataacattctcgtcacttccgtttgagatttaattctcttatctttatcatttttattcaatctttttatatatttttcttgcttcatcccaaattcccaatcatgtttttatatgcattttatgtttgctattattgttacttgctagcaagacaatattagaacatatgctataaaaaggtaatttaaatctctagtttcttaccgtatatataattcaaagtctcaattaatatttcatttgtcaagcttgaatttggtagtctgatcaaacaataaattggggtttagtttcacctaatgatctaacgtgacaaatattgatagaagaagaaaaaacttcgtacataattcttttatttttattataaaaccaaagcaaacgaaaaaaagaaaacaacaacaaagcaaacgaaacactaaaacataaacatgcatgtcataataaagtcactcatagaatgacaaagacttattttatgtaaaatacacaccatgaagcaccaagtataattggtagtcattggtagcttaacatgggaagtaacagatacacttgtgagctgggaagacatagttgcaagatccatgttttgccccctcaaggttaatgcactgattcttgcacgcattgctgtttccgcaaactcctgaccaagtaccacttggcttctcgcacaacttctgtgcttccaccattatcggtgcttctgcattcatatataaatatcttgttaattaccaataaatctaaagaggaaaattcagaatttattttttcatgcatataatattataagatcattactcaccaaaagcagcaaagagaacaagagcagcgaagaggaaagtgatgatggcagcagacttagccatgattatattactttcagtttccaattaatgtatgtttgtatgtatttgtgtgtagtgtgaagatataagcacaatatcaacctctatttatagtgaactggtgaagagttagtcttttacatgtcaagtagatattaaatcgtaaatagctaatgatagaagataagatgttgactaatcaatagttgatggctggtttctccgccacttatctttacatatgaaaggctgcctgatctatctaatgtaagctaagcgggcggttgtgttggctttgagaaagtgctacattgttcgatatgttcacatgggctgatgattcatttttcttttctaagaatgtaaatatcattaatcagtgtacgtttacagattttacagattgcaaaaccagttttaaaggtccaaagtaaacatgaaagcaaaaacaactcaaacttcagtgcatcgacaaaactttaagctatgaatcttatcggtgtcgagatgcaatgataacgattttgaaaaaccgggaaactggaaaaaccgtgatatacatagcccataaaggaaaagcaacatgaatgtcttggttatataacttcgctaaacggaagctctttcacaagctgcctgagggattcaaaaccttcactccaaatgatattcaatgccctacgcattgcctagcattcgtggctcatccaactaaaccgagatcaagcacaacttctcgatttaaacattggtgaatggcggacaatgccgagtccgcctccttactatgtcgaagccagacatcattcggtctttgtgaatggttccatctactggttcgaagtacttaatggttacaagattctatctttggatcttcacactgaacagttccatgatgtgtcccaagaccgcgcgcattacctacacctggccgctagtcaaccttgaagatcttctagccatggttagtggcagtgctgaactttctgattggaaattagccatatggacattgatacacaagaagagacatggaccaaaacttactcaatgcgtttattccctggatatctttgccccaactatgtgacgatgaagtgcattccacttacaagccttatcctccaggggaggtggtacagatgtattaaaaggaccctctcatatatgtttcctttaacttagtttaagaacacaatttttttgttcatgcacaaataattagtttaagagtttaatgcgtagagtaatccaacacaaagcgtgaaaatatgtaacataggataattttattttattttgcttttaaataaaaaaatagcgcataattatgtgattgcataatcataaaatatatattttttaatcgtagttacaaattattaaaaattgcatgaacataatacggatacccaataattctacatgacatatttgaaaggttgttgttagaagagaaaaaaaaaaaaaaaaaaaaaaaggacatagttgaagggttgtaccgcatgataatacttacgacttacaagtggcaatgaagcaacgtggtagcaaacgaggcccatggtcatgtggcccccggatgcgtagatcaacacgaacataacatagcaccaccaatgacaaatagaacaacgaatggaaaacaaaagcatttttcgcttcaagccaagtgttttatgtgagagtccaattatgtctttctttcagatggtgtctactctctttatagcttgcaccttcttcttgtgatcttgtgtgttagtagacaccatctgaaagagataatggacttctaattccaaattggtacaatatgggtttcagtcatttaacttggattaactttcaaacccatagaatttgtttatcataagtatcattgactcttgaaattagtgcttcaaatgtaaaactataactaaccggtctagtgacatgaaaaataattgaatttgattataaacgaaaagaggaaattagaagataaagccataagatggggtaaagtcttatgaaacctccaacggtatgcatagtgatggcattaccgtcaagtaactacgatttttaatattgatatcaaccaattgtattatatacaccaagagggtaacggctatagttctatcaggtttgatacaacaactaccaaacgtttctctcagattctcatcatagcacacattataacacgaatgaattgttagatctagacattctaagcagttagattgcttgaactttagtcgactagtctaagcgagatttggtagagtttgaatcttgatctaaccctttcttctgttactcttctttttatttgcatgtataacattccctgccccagaagaagaggtattggtggtcgagacagtggcgtcctggacctctttcgtctctgagacttcactctcaccatccatttgggccattaggtttccaagctgagagtgtgaataaccgatttagtaggtgttttattatataaccaacaaagcagggggttgtattgtctatagatgtttctttacctgttcttctaagccctgaatcttttcatcctttgcccgaactgccttcttctccctaaatcaaagatcaatgagaaatggagcatggtctcacaagctagcgaatatgcacaatttcccatgacgagatttgctagatagataatacctttctttcatttctgtaatcttggtgctccatacgtccttatttttcacaagattttcgttcaactacacatgagaaaacaacaagtcaataatactctacagaaatgtaagtagatgtaaatatgccatcaagaaaaacttttaaaacgaaagctagatagagactcacatcttcaagaaattgcttctctttgacacatctgtcaaacctggtttgcagcttctgcagtctctggcttattgccttgctcgcagcttctgagattttctgttccgtttcctctttgacattttgtagcaacttttcaaaatactaatgggcgaggaaaagataaaaagaaaaccaagaaaaaaaattaacacttaaataaagtgaagcagacaatgaaaacctcaagagactggtagttatcgagacaacaaaaggctaacaggacagggtaggtgcttacttgtttttgattctctagttgtgcctggagaagttcgttgtactcactaatgatctgtgttttggaaaagaaaaacgatgaggcactaaatttacttaagaatgttgctgaaatttgacaaaagtgatcaggtcgacacaaaaattgaacacgaggattatgaaaatatgaaactgaagcactaccatgtccactttgctgttcaggagagcatcagtcattccactgtcagaatattcacagcttccacaaccatccttgctcagacttccatgagaattcaactccactagcttgccatcagttttggattgaataagccggtgaacataattgtcaccagcataatcccaaacacgttgtgtttcaagctcaagtgaatagcaatgctctgtctcctcccagtgccttctggcatgtccttccttgtacctaccataagtatttaacaaagagaaatggttaacctgggacagatgagaaggagacatgtctctaatgctaattgcaggaaatgcagtacataccttccgcagccaacaaccccacagataacacacatccagagattctccgttgtttggcaaacacaacatactgaattttcaggttgctgttggcaatatcgacaaacctgaaaataaaaaacaacacccataaagatatgtaaagaaaaactgaatattttctttgaaagagcatgaaaatgacaagaatcttactgggcaagaagaatctggccaattagaaatacatgagcaatggaaggaatgattgcacatggttgtgagaatgccacctgtgtcttggtccaatctctctgaaacatgagcatatattaatataccgaccaaacatagtcaatatatgacaccagagatactgtcaatcttaatatcaatacctatgcctacactttctagagctagactaagccatatttctgcatatattttaataattcaggttaagaatttaccaagacacactgggcaagtaggttgctctattgggccagcagcagaaggctgtgtatggtcaatggatccactataaccggtaaactgaacatcaagagcaaaaagcaggcgacagacatcttcctgcacagagttggcaagcagctaatcaattaccaagatacagttcaacgtaaatatacatctgacataggttgactcaaacaaaaccatacgtccagagagttgaactgtttccctctgaaatgctggaagaatgtatcggtagattcctgactatcaaaccttatcaaaatgctgtatctattttcaatgtcatcattcctgtgaagatcaaaagccagaagcaaactaattaatcatctccccattcaaagtatacatttcagaacgaaatagaacatagcttttgatgataaatttatcaatgtctttagtctcctatcctaccagaactagaaggatttcataatcgagcaaacgaatgatctctaccgtgtcagtaagagaatctgaaatttcttttacctgacggttcgcatatccagtatgtgctgaatgaaggagccgcagaactggcaaaaatctgcatatgtcatgtggttgggcaccccaagaacgcaaacgagagggttccttccaatctaaaacaaaattattccagattcaaacatataattccagtgaaaaaaagaaatcgatgcaatcaagcggaagaatgaatcatagaggagaggaatattacagggagattcgaggaggaggaagaagaagatgacgaaacagcattgtcggaaattagatgcatgacaccgcgagtctcgccgattctagggtttccagaggaaaaatgaactgtctgaatcatatcggagagagaggattcaccggaaacgcttgccgagttcatgactgttcacttacttgcttcgacgagccttttttctccagaaaacaaaagatgtgatccactgcacatgaaataataagacgaatcagttaatgaggatggaaagtaatacagcagagaatttagtacataatgaagaacatctataaaaaacaatgttccctctaacaaagaaacaatgctcaagcagcaaaatttgaattcaaccaaacagatcatcaaacctacgcatacccaaaacccttatttgattttcaattcatataaaacacaacgaacctgtttctatcaagatatcaccttatttcgtattttaattcatataaaatacaacaaacctatttctagcaagagacagacaataagtatctcgagtttatttagaagcaaattaaactaaagcaaccaaagcttgaattctgagcttaataatgctgctaaacgaagcaaagcttttttgaacagagataattcgacaaacaaagtatcaagacacaagtaataaacaaattcatctaagattcacaagaaaacagaaacttgatctctaatatctcatcacaagtgagagctttcataaccaacacagacacggaatcaacaagtagtacagagagtatctaaaatccagtatcaataattattagcttgtatctgtaatgctcccgattagattgtatctcttgaattaacgtttataaacattagagaacacacacttagctccatacataaacaccaagcagcatatatccaaaaataaacagacacaagtaattacaagctctaccaaaaacaaactctacatattctgtgaggcatttcatcaaacacatggttggcatcaaaggaagggagagagaaaatagcaaacaagtgaaatttggacaaacccacaagctgaaatcaaaggaagcatatgcagaatcacaattaaaagaatagcaaagaacaaagcgatgaagttgcatcaacactgagagaacaaaatcgacgagactatcacatgaacgaaaatttcagagagaacttattctaatcaacggattcctattctaatagaacttaccagaagtaggagtcgagagagagcttcgtcgccgagagagaacaaaatcgacgtgtgagagagaagagaagaaaaccgatgtgtaattgtttagttgaagatgttgagttggtaaaaaaacccagcccagcccgaatctgaattgagcccgcccaccagaagcccaaattaaaaaaaaaactgatgtgtatcggatttaatagtaggtagacctgaaaaaaaaaaacgatagatactgggcctgtggataccggaacttttatacttgagtttttttttgtttttttttggggtatttatatgtattgattttcatacatgttcatctaaaattttctatatattcatctaaactctgttaatttttttaaaacttatataaaataatatatatatatatatatatatatgacggaaaaatataatcacaaaacaatgttcataaattacaaacttcctaaattacaaacattaactataacaagataatttgtaaccaaataaatagcacaattgcaccatttttctgaagaaacttggtccaacggaaatacgaaataatcaatcatccaaagttccaaactaaaagtaagcttgcattctagttatattttttagccataggagtatcagaaagaaggaacaactcgatatcatgtgttgtacattagcatcgtgttgaacccttggtcctcggtttcaatttctctctttgcgaaccggccattaacttgcggtctcatctctgctaaacgtttagcttttattgtcactgctaaacgtttgttttggattattgtttgtatagttgttctatactcgtgtctatcataaacattaaaatcaagactaataccaaaacacaaatcaatatactaatttggaaaaaaaaatcagttaagatcgtcaacgaacgactctcgatgagaaaaatttatgagaggtgtgttgagagacgtgccttcttaattaagtgattcgtccgagatgagatctctacaagatctgaagaacctctcattgactttcatatcttctacaatttatatacatgttttggactaaaaaagctatctatatatatatagcctatataggtgaagtttgtatagtaatggcgagaacatggttcagtattagccattattagtaaactgacactaataatgttaaaatatcgtcctatactcgtgtctaactgcatgtctatcatgtacattaagatcaagactaatataaaactcacaaatcaatatactacttaagaaaaagaaaaaaatctggttcttttttattcatgcacacacatagtataagttaaaaaatgaccatattaatttgtaaactgaccaatcgtgtatataaaaggacaccttctctacctacttatatattatacatcatttctctacattgttcaccagctctctccatctctctactccaagcataagaggtaatctctcaatagtttgaaacaaccttttgtaaaacgtattgtaacttacttaaaattgtagaacgtgagaaatatcttaaatgtttaaagtcttcctttttcacccaagaactgaaaatgattttgcatatatattttctcaagtgggtataatggatataaagaaattatacaatgactaaggaacaaaataaaatctcttttattgaataatgatttgaatcagttctcgatggcccaaaggttggaggcaaaaggcggaaagggagggaatcaatgggatgatggagccgaccatgaaaatgtaacaaagatacatgtacgaggtggtcttgaaggaatccaattcatcaagtttgagtatgtcaaagctggacaaacagttgttggaccaattcatggtgtctcgggtaaaggtttcacacaaacggtaagcatgttaaatatagaactacctgaactctttttttttgaagatataaggttgtatcctggattgaatgtttagaaaatttgaacacagaaactaatcggttgtgaaggtgatatgatgttaatagctagatgtacatgtatatccttactatatatatcagaactttttagttggtcaacttttaatgatcggtgcttaaattttattaattaatcgagtctccataattgttttaaattatcccccacagcttatatattactgatcaagttttaatattcttttttttttcttacagtttgagattaatcatctcaatggcgaacatgtggtgtcagtaaaaggttgctatgataacatatccggtgtgatccaagcacttcaattcgaaaccaatcaaaggagttctgaagtcatgggatacgatgacactggcactaagtttacacttgaaatcagtggaaacaaaatcactgggttccatggatctgctgacgcaaacctaaaatctcttggagcttatttcacaccacctcctcctattaaacaggaataccaaggtggtactggaggcagcccatgggaccatggtatttacaccggcataagaaaagtctatgttacatttagtcccgttagcatatcgcatatcaaggtcgactacgacaaagatggaaaagtggaaacgcgtcaagacggggacatgcttggagaaaatagggtccaaggacaaccaaacgaggttctagttttaacactccttacttcttattattttagttttttttggtaaaatgctaaatctttaatagaaaggaatatgtcaagagtaaatcatatatgggaagaatcataaaccattcgttaacccttcaattttttaaaatatataaattgaaggatccctttatttgttttttgcagtttgtagtggactatccatatgaatatattacatcaatagaagtgacctgtgacaaagtctctggcaatacaaaccgagttaggtcgttgagtttcaagacatcaaaagacagaacatctcctacatatggacgtaagagcgagcgaactttcgtgtttgagagcaaaggtagggctcttgttgggctccatggaaggtgttgttgggctattgatgctctaggtgcacattttggtgcgcctcctattcctccacctcctcccacggagaaactacaaggatcaggtggtgacggaggagaatcatgggacgatggagctttcgacggtgtgagaaagatatacgtgggacaaggtgagaatggtatcgcatctgtcaagtttgtgtatgacaagaacaaccagttggtactaggagaagagcatggaaagcatactttgcttggatacgaagaggtgattaattatactatacttcgttgctattttcttaaactataactataaagttgtgttattgttattctgatgaaccgctttcacagttcgagttggactatccgagtgaatacatcacagcggtagagggttattatgataaagtgtttggtagtgaatcttcagtaatagtcatgcttaagttcaagaccaataaacgaacctccccgccttatggaatggatgctggcgttagcttcatactcgggaaggaaggtcacaaagtggtagggttccatggaaaagctagtcccgagctctatcagattggggtcactgttgccccaatcaccaagtgacgacgtccttgaactttattctcaaatcaagtttgatcatgcatatttgttaaggcgcctctctcgtattgtctccaccacttttctacgtgttttgttttctccgatgttttactttgaaaaatctatttcaatcaagcaatatcgtgtaataaaagcaaggttctcgaacctgcgggtaaactttttattttgaataatttattttcaatcaagcattcttttgactttttgctttaaccaaatgtctctagtttcaaaaaagattaagaactcaaagatataagaattactttcttattaagcttactttcttattaagcttaggaaaattactcaaaacgtaaacaatctcaaagtcttaatttctctaaactcatatagtcaaccacagcttgggactcatatatatagagattaataaaccaaaacatactaggattagcattagataactcctaacatatatctttagatatctcctaaagatttaacataatccttcttattctttaatgacttattgctcaagtcatttcaaacttactccaacattctcccctttaagcttgaaaacttcttttgacacctcttgtactccaatgagatctctcatctccaagaacttgatcttcccaagcgcctttgttagtatgtaagccttttgtcgaactccgagaacatgttctacttcaacttgaccattctcaacacactcccgtatgaaatgatatcttcgatggatgtgtttgcttctcccgtgaaacaccgggttctttgtgagagctatagcagatttgttatcaactcgaatctttactctctcacacattgtacctatgacttcagcaagaagtattaatatgattaagaacacttaggatttaagaataactctcttactaagcttaggaaacttactcaaaacctaaacaatctctaagtcttaatctctttaaaactcatatggtccaccacaacctgggactaatatatatagagattaataaaccaaaatatactaggattagcattagataactcctaacatatatctttagatatttcctatagatttaacataatccttcttattctttaatgacttattgctcaagtcatttcaaacttattccaacaacgtcaagtttctatgtttgatgtatctttcgctttgttacaaggaatacaaaacaaatgttttgaatatgtttaatccctacagcacggggtgatgttttttcgaagtaacattagttaataaataaaaactacggttgaagtatcatattcggtaatataatttgtatgtatctttattttaaaattttaaatgtggttggctaatattgatgtatgatattacatgttgttaacatcactgtagatctctttgattagcgtaggctaatcgtgattttggctgactggggttgtcggagcccctgttagtttcgtgatttggtttccattggtctggattaattttgactggttttggaaaaggtgcgttggtcatcggtcgatacaaccaataatctgaaataattgtaaaaaagaaagtctattgtgaaagtaaggaaacaaaaatcaccaaaagccaggagaacttgagaaaaaaaaaagaacatatttaaaatttgatggagaagatcaagagaatccgatgagaaaaaaaaaagaacatacttaaaacttgatggagaagatcaagagaatccgacctgaaacacagtaaaaagagaagaattcaacaacatcatgataaacttttcaatccacaaccaagccaaaatcaccatcatcattattattcaaaaatgaatataaaactaaattaaatcacaaccacgtagtaattaagcgatttttttcttaaaaaaaaacataattatgtagagagagaaaaaagttacatagttaacaaaagtaaaaatggaaaagcggtaaaaataaaaagtaaaaagggaaaaatatctgaatatatatataacagcaaggtttttgtccgcatatataaataatcgcgtgtgtgttcacctctcagttgttttccttcttcttccttatctccgcctctttctagggtttctctcaaatcagctcttcaaccatggcggacgaatctcaatactcatcggatacttactccaacaaacgcaaatacgaagaaccaaccgctcctcctccatcaactcgcagacctaccggcttctcttctggtccgatcccatctgcttcagttgatcccaccgcacctaccggtcttccaccttcttcttacaacagcgttcctcctccgatggatgaaatccagattgctaaacaaaaagcacaagaaatcgctgctcgtcttcttaatagcgctgatgctaaacgtcctcgtgttgacaatggtgcttcttatgattatggtgacaacaaaggatttagctcatatccctctggttcgttctttaaaatctcttttaacttcttttgtttatggaatttagggtttggaattgaaaacttactgattgtgatttgatcttgatttagagggtaagcagatgtcagggacggttccgtcttcgataccggtttcgtatggtagctttcaaggaactactaagaagattgatattccgaatatgagagttggtgttatcattggtaaaggtggagagactattaagtatcttcagcttcagtctggagctaagattcaggttactagagatatggatgcagaccctaattgtgctactaggactgttgacctaactggtacccctgatcagatctcaaaggctgaacagttgatcactgacgtccttcaagaggtagtagtcttagtctttgttgctaatgatagtgaatttaggtgattgatgtagatttactaatggtgtgtatgattattttggtttaggctgaggcaggcaatacagctggttcaggtggaggaggcggccgtaggatgggtggacaagcaggggctgatcaatttgttatgaaaattccgaataacaaggtacttaatgctctggagattgaccaatttttggtaatatgtgtcttgtatgtaatatgtaaactgttctaggttggtttgataattggtaaaggaggtgaaacaatcaaatctatgcaagctaagactggagctagaattcaggtatgtgttcttgtcaattatgtttaggttctgtttgtctccagctggtaaaatgtttattcatcccgtggttatttgtctgcaggttattcctttacatttgccccctggagacccaacgccagaacggactttgcagattgatgggataaccgaacagattgaacatgctaaacaattagttaatgaaatcatcagtggcgaggtatgtttgattgttgtgtttgtttatagattatgacaggcttctgctgtgtctatttttatacatgaatttgatattgtgttgtgattacattatttagttgtcattagctttaggtctatctagtatacgtcatactctattattcagataataggtgatgtaggttatactagtttcacttagtcaatatattagctgctaaaacctatatactcttcttatgccttcatttcctttgatatttgctccacgataattgcatctgcattggattgcattgttcttctcttccgcttatttgcaggggaaggttctttattttattttaaaccacgtgaagatattttttgtgattttcttaacttacaaaaaatattccatcttgatatatcttactttgttattgcattgtaagattatatgttgcttcttcttcctctgctcatgctcattttgttgccgctaccttcctacacgagtttcatgtttctgttactatcttattgtggcagtttttatgggcattcgcttatatctacttttcatctttttcaatatccaatttacagtgtgcttagcatgattcttcataactcccattgctaccaagaaatattctttagcatattcacttttcaaatgctattttcatagtagaaatcttgttgtctatttttggagtatatatgcagacattttcatcgcttctggtcacagccaaggtggccaatcctacattggtttgggatgcctttgtgaggctgctgactagtttcagtccaacctgctgtgatagtgtttctaaactgttttatacaatactgtttttgttacattgtgttcatcatttcttgggtcaacataacttccgttcagctagtacttctagtttcaatcatcaaggtaccaccaaaggtgggcgactgacatttgaagacctattagccgttgtgttgtgtcaataatttgctaaccgagtaactgttattattctgccttggtactttccccaatttttcttaaatccgtttttctttaccttcaccattatattctggtaatatacttccatgagtattgacattgttgaacactagactctttagttggtattaggttattttgctgcacaaccctttgagaaaataggttccatgtgtatatatatgttgcttttgtctgcaaaagcttctatagtattcgttgttttttcttgcacccatttatctcgaatagggaaagggatgggcttctgcaggagtaacccaataatttcaccaatcagtacggtatgtaggcatcaccattacccttctagaatatgatatgatcttggttgatccgatttggactgatattggtaaatagcgtatccttgtatgcatctcaatttagtctttgttatccgctttatttgtctctgcctctgtgttctatgtgtttatatgctgtgtcattgttttattttcctgttaaaaagtgacctaagctatttattctaacgatttggtttatgcagaaccgtatgagaaactcagcaatgggtggaggctatccacaacaaggtggttatcaagcccgcccaccctcaagctgggcaccacctggtggtccgccagcacaacctggttatggtggttacatgcaaccaggagcatatccaggtccacctcagtatggtcaatcaccttacggaagttaccctcaacaaacttcagctggttactatgatcagtcctctgtgccaccatcccagcagagcgcgcaaggtgagtatgattattacggtcagcaacagtctcagcaaccaagcagtggtggtagctcagccccaccaacagataccacagggtacaattactaccagcatgcttctggttatggccaagctggtcagggataccagcaagatgggtatggagcttacaatgcctcgcagcaatcgggatatggtcaagctgctgggtatgatcaacagggtggttacggcagcaccactaatccaagtcaagaggaagatgcatctcaagccgctccaccatcgtcagctcagtctggacaggctgggtatggtacaactggtcaacagccgcctgctcaaggtagtactggtcaggcagggtatggagctcctccaacttctcaggctggttacagcagccagccagcagcagcttacaattctgggtatggagcaccaccacctgcttcaaagccaccgacttatggccagagccagcagtctccaggtgctcctgggagctatggtagtcagtctgggtatgcccaaccagcagcttcagggtatggacaacctccagcgtatgggtatggtcaagcgccacagggatatgggtcttatggaggatacacacaacctgctgctggtggaggttactcttcagacgggtctgctggagccactgctggtggtggtggtggtacaccagcttcacagagtgctgctccacctgctggaccgcccaaagcatccccgaaaagttgatatgtgtatggataaatttctactgttatacaaaacatgcttccatgctcttatctttttcttgaggatttatcaatgtttgtgtttcacattttagctcttgtctgtcaactctctttatattaaagataatgttacgttttagcctgttattcttcttacaatgattcaaattcaccaaaattttaaatccgaaaattataatttgctaaacccaaaaaaattatttcaaaatttttgttttgccaatgtctttcagctattctgtatcggttaactctttcagcaataaggattccgacacgactgatgtgattaggcgtaagccaacattaattaataataaaagctctgaaagatatcatgtgggtgtgttggacaaatcgcttttctctcttcagtgatttcacagatctgttccgacatcaatggcttttttagcgttgattggtcggctctactccgaaatcgtctgactttcacagcagcgatgttcggctcttacgtcccgttttaatcgggctctcgttcggcacctccagctttttcagtgaagatgaccgactcttttcccgacagcatacggctccatcagcggtgttggtcggattttagttttactttggccatagatgagttactctcaccttttggtctttgttttcccttcaataatttcagcaattatgtgttggtgataacgatttaggtgctatgttgcttaaactgttgattatccgactcatgttgtttgaagcttggttttacaggaattattattaatatttgcagtttataattgaagagaagaagaagatttcgaagcatattacacaattcctttagctgctatatttcagtttggagtttcgattgtcctatttctggtgaaaactcaaagattcatgtttcgatttttgtatcgacggtgactctttcaccagaatcgagctcgtacggcggaggctgaatcggaatcctttaggttactcatccccacgtgtctgatttgtatttcattactgacacgttgcgtttggatggagacaagatgccaactcttcttcaatataatgtgatcttgggctttacttaatcttgtaaaatttaagtgtgggctgtggtttgttttagcccatttatgtatggtttgttctttcaataaaatatgagacaaaaaaaaaagatatcatgtgggtttaagcatagaaacgtttccacaaacaagtctgtcactttattggatacatatatttttgttaatataggctaaggagaaaagaggagtatgtgagaaggctaaggagaagatgatgtcttcattcaacttgtgaaaaaccaccaccagtctcggcttttgtcctaccaaacaaacagagtttgtaactgaaggatattcacatacgaaagaaagagtaatttggttgagattcaggtttacttgtgatctgaaggatttggtctaatctcatatacgattgtcgcaacaacatctcttttcaactgttaagatcatcaagggtaagacttaaccaactaaccatacaatataataaatatacagcatttgtatgcaaacttacctgggttgcttcacctttgaacccgatataacgtatttgggttgtgtcacctccaaaactctcagggaaatgcagggtgatgtttccaacactctggaactttgaatacctaatcacattccccactttcaatgtatcagacatctaacttttgaccagttgaatcaaagtcatatatagttcagtgaaggataatgctcgattcatacagactacttaagattcattacataaagtctgcagagtctattaaattcagtaaatgatatgtgtgtagcgaaaatacctggtctggtattctaagactccttgcaaattttcagctaactcccattccttcaaaagaactcacaattgtttctgcattagtgcaattgtctttggcatttaataagtaagtaaaaataatcacaacggaatacctgaacggcttgcatactctcagcatcggagaagtcaatcccttcacgattgataaacctagttttgagacaaaaaaaagcagctttctgtctttctctaatgaaggaaccatatgcagaattcacacatgtatacaggaaaagttctgtaaggtagtttagacatacactctcaacttagaaggacttgttccttcagggccaccaacaattgatatgctcttgatcttgacgtctgatgtaaatctacaataatgggacatccaaaaagtagtaaacaatttaatagtaagaaaacatggactgtatctagttctcccaagcttctttcaagtcaatgatctgaaatacactatattcatatatccaaaccaataatattagaagaaaattgaagtaactggtcggtaattaagcaaataacagacatacggtacaaaaacaagcaattcagggtctccctcattgctctccaaatgctcctgtaggcaagaaaaaaaaaaagaaaaaaactatttacttagacattatcatgcacatagctatatataatttcactgcgtataaacatagtatttgagtaaggatagatataataaaggatcattcagcagccaagcataatattggttatgtaaaacataaagttaccccagaagagtgtaatcgctgttcccacgctttgaagactgattttgcacttcccgaaacagattcattcagagctgaaacctgaaaccaagtaatattactagttaaaaaacttctcttgctttaagcatactaaaaccagacactgattcacacagagtaacctaaattcttctgaaaaccccaaaattaagaactcataaggactagattatcacatttctgaatcaacgtatatcaattagaatctaaattgtttggattcactaaactagtaacatattagacgtggtgattgaagatttagacattatttgagcaaaacaaacgaaataggtaagtgattatagaaaagagagagagagagaccttggagagatcaatgtgtttgtagagagaccaatcggaagaacactcatgatcttcgcagttgtgatcatgcgtacacgacatttttcccaattctcgtcggctaaacacaaaatctggatttttcgccaagaaatttcgagaaacttaaaagcgagcagtggaagaagaaggtgggcatcaaactatcacaaggccgacaaaaagatattccaactacacgacgacgtattagtttttggaaacgcagcgttttttgtgttggtgtttctgataagcaatcataaaaatcaatcccacgcagcgttttgttcataattaatcttcttctttttttctctcaatgaaatgttgattctgattagtacattattaacttagaaaaatcattctacacatatcctaaatttaacatgcatcgttataacatctttacaactgttgatcaagttcttctcataatcttcaaatcaaacccacattcgaaaatatgaatatttgctagcttttccaaacaaaaagtatgttgaatttcacatttttgggttagttcgacatattttagaatatactataacataatctatgttatcttctatcatgcattgaacgatctctactctttttcttttttttcttttttagcacaaacaaactgaattttattaagattaaaagtcaaacataagtttcttctccttatccaccaatggtagtaaccatagacggttacaagcggaaactatcaaagcaataagattcacacatattttcaaggctggccatgagtacaagcgagccaaattcatatatttgcaagcgtaaatacaataattatctccaaagctttatcagcagaattagtcattcacttactcaaagtgttaaagggctgagagcgcgaacccttcttccttcatatcacttatctttaagcttttttttgtttttgttttatagggccaaatctttttctacgtgtagcctaatcggtcgatatgcatattccctaacttcccattaaactaaaggccaactatctcacttgtgtagcctaccctcggccaaagtgtagaatctttcaccgtctggataagtgttttagaatcactatagaaaatgacttccccaaaatttgaattcccaaatcccaacacaagacataactcaaaaagtttatttttagttctttatattcaaatttaccacaatacaaaaatcatttctacaagactcattccggcaaaagaaaatatttcaaaacaaatttaactttcaaatgattaatgtacatggcaagttacattaccaatctctattgtggaaatcaaaattaatttggaattgataagtttcgaaactaactcatttttcagctaataaacaaagatacacgtaactataacgatttagggaaaatgatcattgagtgaacgaatttagtctgattgctttacagtgacatttacgttacactacactaaaaggcaaaacatatgcatgattaatgcccaaaagcccaaactagtgtcctttttctttaactttttccacaatgaaacgaaacaacattcattttccttcttttaaagaggaatgatcttatgtttccccagccgtgaattgcctagcaatcaatcatatttcaaagtttaaagattaagtgaatttgccaaatgccaaggacgaaaatttatttaggtaaatgacaagtgttttaggtttttattagaaacaaacaaaaatatattgttcaaaattaagatagtaatatcacacgttattttatcaaaaatatttttgtaaaattttaaaataattgcattcaattcaagcacaaaacactttgttcatattcgaaattatttaatcaattttcaccgtattttcgctttgaaagtcagaaaatcttcgtaaccttcctctctcattcttttatgttcttgacacgagtttgtctttttccaaagttttttcattgaaatatatattttttttaaaaatcagaaaagaatcatggaagtaaacttgtagagccatcatacgactaaattgagattttctgaaatgagatataaaagatcactgtctagctgcacttgaaagagatagagataatagaaatgtttgtcttgcttggactattgtagaaatagatttggagttttcatttggaaaaaatattgatttcctctcgataatcctcaaaacaaactcgtattggacatactaacagatgataaccaatgttatatgttttcttaatgactaacaacgatatgtctattttagcttagtcaacggattctcgtgtttcaaatggtagtcaacgttttcatgttttgaataaccttgatgttcaaaatggtcacaatttgaaagttgactagcagaatcgtaaatgagtgttagagattgcattaacaactgataacatcatgtctattttgatctggtcaacgaatttttatattttaaaaattactcaatgttaattcacgatttaaaagaccacatataaaattaatgaataaattacaactttttaaaaattaggaaaattaaatgacaaagccaatacttttggcttttaactaaaacagaatatctataattaaaaaaaaaaaaatgtacattttactagcgtgtatagataaaacaagtaatggccaagcgttacgttggcataagaatgattcattgaatattaaaatttataaatagcagaccccgcctcgtcttctctccgaagattcttatccacgtcacaccttcttcgcctgagaataccacctaacaatgaccaccgtcgtttcctttctcgccctcttcctctttctagtcgccgccgtttctggtgacgtcatcaaacttccttctctagcttctaagttcttccgcccaactgaaaacgacgatgattctactaagtgggctgttctcgtcgccggatccagcggatactggaattatcgtcatcaggtatcgataagattttctcttgatcatatcaaaaaatgttgcggttttcgggttttgaaaatttacagctcatgcaagttttgttttaagtcaatctaatttagttttgtcaatattagttacaattcttgctatagtccaatcttagtttcgttccatgttgtgagtgtttttttagacaatgaagcttttcgtgaaccggtcggatgataacatcgtatttttactatcatttcaatagtttggtagagactaatgtgtttgtaaataatttacttttgtcactttgtgctgtgtgtttttatgaaacagtgaagtttttgtgagcctaagttagagtgtgggctgataatatcgtatttttactatcattttaatagtttggtagagactaatgagttataatattgttcaggcggatgtttgtcatgcttatcagcttttgaagaaaggtggagtgaaagaggagaatattgtggtgtttatgtatgatgacattgcgaagaacgaggagaatccaagacctggagttattatcaatagtcctaatggagaggatgtctataatggagttcccaaggttattttttccgctttctttcgagttttagctgcggtttacggactattgaaacggagttgtgatatggttgtggcaggattacactggagatgaagttaatgttgataacttattagctgtgattcttggaaacaaaacggctcttaaaggaggaagtgggaaagttgtagatagcggtccaaacgatcatatctttatatactatagtgatcacggtggtccgggagtgctcggtgagtgatctcctctattttgttgaagttttcatatatttttttactaaagttttgatgatttgaatctccatgtttattttcagggatgccaacttctccaaacctatatgcaaatgatctcaatgatgtcttgaagaaaaaatatgcttcaggaacatataagagcttggtacaatgctcttttgaaaatgctttctttgtcagctacatgtgattttgcttgaccatttttagtgaatgcaggtgttttatttggaggcttgtgaatctggaagtatttttgaaggtcttttaccagagggtttaaatatttacgcgacaactgcatcgaatgcagaagaaagtagctggggtacttactgtcctggagaggatcctagtcctccttctgagtatgagacctgtttgggtgacttatacagtgttgcttggatagaagatagtgaaaaacacaatttacaaacagagactttgcacgagcaatatgaattggtaagcttcaagtgttgtatatataccattccaagttttgctctggaactttcgaactgttcgttcattgagattgttgtgtgagcatgcatcaaaatgatttgattgtttcaggtgaaaaagagaactgcaggttctggtaagtcttatggttctcatgttatggaatttggagatataggactcagcaaggagaagcttgtcctttttatgggtacaaatccagcagatgaaaacttcacctttgtgaatgagaattcaataaggccgccttcaagagttacaaaccagcgtgatgcggatcttgtccatttctggcataaggtttatcttactttctttgcttcctggtgaaatctaaggactaattttgatattgcttctggttacttaatctgtcaagttgttgttacacgtagtatcaaaaggcaccggaagggtcagcaagaaaagttgaagctcagaagcaagtccttgaagcaatgtctcacagacttcatgttgataatagcattctgttgattgggattcttttgtttggtttggaaggtcatgcggtgttaaataaagtccggccttctggagaaccgcttgttgacgattgggactgccttaaatctctggtaaccttttgcatcttcttgaaacttggctatttaaaattgttgcatcaaggtttggatcaactctatatggtttgtattaaacaatggtattggccagaggatgcaagactcaggacgttagatacgatatgatatgtcggaaaaaaatcactttcagtcctcattagatgattaagcttcttgtgatgatcactttcttattctcctttatgtggttgttaggtgagagctttcgagaggcactgtggatcgttgtctcagtacggaataaagcacatgaggtcgattgcaaacatgtgcaacgcagggattcagatgaggcaaatggaggaggcagcaatgcaggcttgtcccaccatccctaccagtccttggagctctcttgaccgtggattcagtgcttgatcttcgtctccgccctatattaatcgatgtccattaatatcttactaccaattatactccttcctatgtagacaagatgttgtaaatatgggatgcttaagttcttgatgtcacagacaaaagaaacagtgattgtaagtagttgtttcaaataatctttgttgttcaagtgatttcaaggctttaagacaaattaacacatataaatgaggcttacaccataatacgtttacatggtacatatattgaggataacatctatcacaatttttctaattttgtaaaatacatatcaagtacaatacgcatagagaggattaaggcttagaggagtcatagcgtttacgttcttcttgtattgactggaaaattctggcagcattctcactcgcgagctttgcgttgtgaggtaccacctttatcactctcgtcactcctcccccatctcttgttgtctgagtaacagttgttcttgtcgtcgttgtggttgttgtcatcgtttgctcaggtgcattgttgatgttgctgtcctcatcaacggctgcgaatggccgaaaggacttgctaccagagattccctgtggcccacttggactgcttcctgtgctcccttgcctgctctttcttgctcgcggataagactttgttggctgttgctgttgctgtggagcaggttcattatcagatctctgttgttgttgttgggtgttctgaagatttccaggatgtccaaactggttcatttgctcattgggttgttgttgttgttgttgttggcttgaacaatatgggttcattatggtgggcatcattccatatggagggaagtagccattaccaggaggtgggaatcccatgccggggtgatattgaggcattaccattggtgtaggcatataatgaccataatatcctccataatgccccgtgtgtgccatacctgggtgaggcttgtatatcagtccttccgagggagacattacagggatcaaccattgctgatgatttcctgaaggaggaggctgaggaggaaagcaatatccatttggagccggtgaagccggtgggttgtttgcaaaaggcatgtagttggattgttgatgatgaccttgatttgacaacctcccaactacgttctcagctgagctttccattttatgttggtcagtcttctccgagtcacccctttgtttgacgacaacatgtggtagaggaggctttaccagaaattctgatggaaggagcttcttcactggatagcttttagcagaaacttttccaagaaaactgatctcatcgagcaagagatccggtgatgcagcaataagtttttgaacctgattattacacagttgaagaggtttgtttcagctcgagaagaaacaaatactcatggaaacatatgagaagtttctgaatgactttaccttaatcagtctgtgcaactcaaatagttgaacagcaaatactctttgttgactgtaatgagaaacagagtcacattaagaagattatccatcaaaagttcaacaaagagagacatagtttaggttgaacagctaatggaacaatacgatcgaaatgagataggaaaaaagaaacaagaatacatagccaatcaaaaaagatagaagaaaaccaaatcaatgggtccaatgacatattaaagcatagataacaatgcaaaggacgggcttattgaaatctagcttacagcgcagcttatcctctgcaaaatgagatgtcagatatttaacaagaagcaagaaataaaaatcttattatttgcattggtcgtgaatccgataccttaccatatggattagagtacattgaaccttaaaagttaagtcatgaagcctacaatcataaaaactctgtagttcacaaccacactaaggatcctcttaagcagtagtaagaagaaactataattctgcatcgtcataagactcaaaactaactttacgtatggttaactaaaatttagatcctggggtcctcggaaaaacatttccctacctggttcaaccccttgaatgacaagtagggaaaatgcccaagacgacagtgcagaataaaagcaataccaaaccgagacagggacatgttccaacaaccagatgcaaagaaggtatagtaataaagccatcggcgggcaccttgcacaatataggtcaacagagaatgtccctccctgctataacatgatccaacgtgttaaacgcgttaatattctaccgaggactctacaactaaacacataataggaccattttagatgaatcaggggcctctcaactatagaaccatcacttctcaagcataaacctgaaatctctttctcccaaaatgagacagaatatgaaactgagttatagtcatatatgtatatcagcaatcaattgcagcattaatcatgaaaaaaaatatgaaggagagtgttctagaaatttgaaatttggtgatagtgaaatatgccctaccacagtcctcaatgaaaatagcaaaaaacaacagaggaaaaagcttcagtaagactacggaacaatgcttaaatattaacttctttcaagcaaaaaatgttggtatcaaagaaggagataaatagaaagagcggagaataaataaccaaactgtaaatttctagtgaacttacttggcaatggctttccttgctctccagaaacgtttttgacctaatatacccacaacatcatcgggagagacatctatgctggatatagaatccaccatcgaatcatcagaaacgtcatcacttgcctcttcatttatctgctgcagagaggcgcatgctctgcttttgctgtattcacgatcattatcaatgtcttcaggactgccatgaccctcttgtgaatgattttccgttgccaagtgagattcagctccattatcagtgtccttcagacgagttttgccaccatctcggtataaccgatttctagactcttgtctcaaggaagcattataatcatttactctatcatgacttgatgctgatttttcgagatcaatctcctctgtgactgatacatctaaagagattacaaagccacctgaccttgcattcgccttgacctgatccctaacttcaggttttgaacaagtagccaaacatacgttttgctttgagcctgtctgattcacttcttgaaatcgaatggagtgatgagagctaggtgccaccattggggtgtgtttttccttctcaataccactcttggttctgccatgagactgagatcttcttgagttaatatatactggaactgcaaaatcttcttcctctctcaccattttcctctgatcatgctgtgccgaagatctcacattttccatgaaggacatttgggagacaaacttctcagttgcttggtttgcggctgaagaatcaagatgctggacagataagtttctttccacaccacaaggctgcattgaagagggtaaaaaaggattatttctcatgtccttgcaatagtctgaatgctcagggcaatcacaagaaactttcatcgaacttcagaacataaaaagaatcaggcacaacaagaatgttagttttaagaaataaaccacacttagataaacttgtgtctacaagactctcatatatacaggagaattcaatcctaaaagctcaatccataagcaaaaagaagatactatgatctgataacaattgaaacatagatcaaccaatgtcctactttctctttcaggctatataacatccaaactcatacaactaataacatcaagagcctatacaatgatcaaaatcaaaacaatacctgactagatggtccaggatgaaccaaagtgcttgtgttgttactacgagaattcatcgttccatgatcaccaaacctctgagaaggaatactaagctgctcataaagagccatcttgtttctaggaggagctctaggccctcctttatctgcatcattcacatgaagccgaggaaacataggttccaatatcttctcctcatctttccctctcttcatcactcacaattcacaacctttttcacttgcaaacttctcaaaccccaaataacctaacttcacaccaaaaatcttccctttctcttaataattcaacctaaaaactgagaaagactccaactttcacaacaataagcttcaataaaacaaacccaccaatcaaatgaaatatcttaacccaaaggacaaactacgatagagatctcaccaccaaaccaatcagagaaaacgaaatcgaaaaacagactaaagaggaatcaaacaaaaccaaagtgagttttcaacgtactaatcgagaaacagagtgggtgaatcaagtagagagagcaaaaaggaacaagattcagaggaaggaagaagatgacttgtgaacagagagaggaaaggggcaaaaagagataggaaaagtggagcccaaaaagatagaaggagaggatctctctggagatattatagatttaatccatttggacatttttttcaccaccggaaaagtgcgtgacgacgtggactctttttgtcgttgtaataagaaactagaaagtaaaaaaaaaaaacatcatccaatacatcactttttgttttcttttaggatacgtaaaatgtcatagatatattaccatgttagaggttctttgatcagtgctttgtaatgttgaataaaagattgttttcagctaaatgaagtctgtttgttttttcttttctagcaaatgagtggagtcatcgacacgattagattacttgaagattcttttctagggttgtatgaaattataggggaatataatgtaatatatgtggatgtgaagagtaattatataatcatgcaatcttccaactcactgaatgaggagagctccgatctgttagggatttccagaattgaaaacaagaatatggaagttgaagatcatgcataaactgaaacaatttctttggtgaaacacagagccggtccaacgtttttaatgccgacgtaaattaaaaaaaacatgtatttctcatttttcatgaatttcgtaaaatcgtttctgaattttatacaatcttttctgaatttcttagatatctttggatcgacaaagtccgatccatagtcaatccctactatgcgggataacgcgatttagtgggatcgaactccagtagggtgggtaggtggagtcaaatagacacgccctatgttttgttaagttgaaatccaaaaatatgagtgaaagaaaatccaaataatatttatcttaaaaaagcctaaaatatagtttatgtttaaaaaaggaaacttaaaagataatttgtcttaaaaatgcttccaaaattttgatgcccaactccattcatttccttgcttggaatgtgggctaggcggcccaggcctagagaaacatagcaaaagctctaggagctgtgatacgttattggaaatgtcccacttggacactcttatttactaaaacacgtttcaaatccataggactaataattgacaatatataccaacggtgatatgctgcagctgaagacatcaaccccacatttttcacttgtcctgtatctaacgttgatattgtcccaattaccttgtctccctttgttaactccatcaacagtttgtgagaaagaatattaagaggtttttggacatgtatcaattacaaaacctttaggatcatcaaaagttacttccgtttttagatacttttatatattgcttattcggaagtaaagaaacaatcatatttaccaaaaccaacaagtgaatgtatccttcaaaagatagaagtcccaagttgtgatgctaaggaatggattggggcctttgttatgtataaaataaatttgcaggggttccaaaatccaccaactcaaactatcatggacttgtcctgtatggtgtcgtaaaatgcaactacgatccatcttacgaataattctaagcatgttatataattgggagtggtcggatagtgagaaatcatttcggagttcaaaatactcggtggcactatgaatatatagcactaatacctctggaagctt

SEQ ID NO: 285 - DNA, 82212 bp, Arabidopsis thaliana
aagcttgccgcgatgccttccgacaccttttcggtacaatttttccgacaccaaaccaaacaacaacaactgtctactttaattgcttcatcgttattgtccaattaataactaatttttatcactcttaggtacaagaatcgctcttgcttaccagaaggaggtaatatacactaaattatatttgtctgagtttccatgagatttttgattatttgtttttattgtttttggatagatgaagctacttggacagatgctttactatgttcttacgacaggttcagggcaacaaactttaggagaggaatattgtgacattatacaggtttttgttactttatacaatcttccttaagtgtgcttctacaaaaccattttaccttctgatgtagaatgatataatataggttgcagggccttatggactctctcctacaccagctagacgtgctttgttcatattgtaccagaccgcagttccatatatcgcagagagaattaggtttcgtcgcatttcttattgttgttttacaaagaaaaatttgaatcttgtccgctgatattgatataattgtctacagcactcgagctgctacgcaagcagtcacctttgatgagtctgatgagttttttggtgatagtcatatccactcaccaagaatgatagatcttccatcttcatctcaagttgaaacttcaacttctgtagtatctaggttaaacgatagacttatgagatcgtggcaccgagctattcagcgatggcctgtggtaatgtatacccctcacgtttaattttccatggttcgttcacttgttttctgcgtagcaaatgttgttttatacaaggttttgtgccttttaggttcttcctgttgcccgcgaagtcttacaactggttttgcgtgccaatctgatgctcttctactttgaaggtgaattttgtgagaaatatttaactcatgtagagcatgttctgaactagtaacctttgtttcttttcaggtttttattatcatatatcgaaacgtgcatccggggttcgttatgttttcataggaaagcaactgaatcagagacctaggtaatgatttttttgtcttcttttacacttgcaactcttgacttttactatcacagagtaactgaactcccttaagtcttgttgagcagataccaaattcttggggttttccttctaatccaattgtgcatccttgctgctgagggcttgcgtcggagtaatttgtcatctatcactagctccattcagcaggcttctataggatcttatcaaacttcaggaggtctggctctcatgtccttgattatgaatgttaataatctagaatttcccaacattacggatatttgtggaggatatatatgttagattgtcagtactatagtttcaataaactatggtctaaattggcatcatggtaaaagtttgttagaaagatacatgagagaagataacataggctgaaatattctgcttgttatgcatcaccctatttcacattacagtaatatagttttggtattgttcttgcagggagaggtttacctgttttaaatgaagaggggaatttgataacttcggaagctgaaaagggaaactggtctacctccgattcaacttcaacggaggtaaaatatttataaataagttagaaacttctgttactttgtaatggctaatatcttgaatagtgatcattattgggaaaggacaataggtaataatatacttggaagagaggcacataactctgagcaaaatgtattatgctcttacgcaaaggttatgttgtataagtgtgattaagaaaaccaaaatgatagtttactctgttggtatgagtatctgataagagtagatggccactcgactgatcccgctctacatatagtttctagcgagacaaggttatatgttaatcctattttgagactattctaaatttaaaaaaactccagaggggtttatttttctctcgttttgatgaaatcaatatgttaccacttgttatgttaggtgtttaccttgctatgtacttcgattgcaggcagtagggaaatgcactctctgcttaagcacccgtcagcacccaacggccactccttgtggtcatgtgttttgttggtaataaaccttcctctaccgtaattgcttattttgtcctgggcctgatctggaacgagttaacacctacaaaccttgataagtttcagaatccagagaatttcaatatcttgatgtccattggttgaaactgcttttgataagatgaactttgtatcgaacatttactcgaactacaaaacctaagatccaaaagttgacaccggaacattgtgctcattttgaaagtcatgttgtcatgtgcaggagctgcattatggaatggtgcaacgagaagcaagaatgccctctttgtcgaacgcccaatacccattcaagtttggtttgtttgtatcattctgatttttaggcacaatgggatcaacaaagacaggcactgcagaaaggcaaagcagctaagacagtgacacctaaggacagtgcatctgctacaggaatggaatctgcttcggcttcagactttttgagtaagatcaacaagttatgagagaagacagaataaatatatttctgacatcattctcgatcccatgcctacctttttctctatgatatttagtgcagaaaccacagaggtttgttgttttacatttcattaaaaagagttggagatgttaggtggtctttcacattctatattacatataataatctcaattggagatctattacaagacaagaaaatctcatattaggcacaataccattttaaaatgttaggtgttgttcgtttaatcagttaggtagtgcctctgggtgatccatccagaagatccattcagatgcatcatttggatgatgttcgtttctgaagttgatagtgcatctggatgaatcatttgaatgcagatgtgttcgtttgaattgttttttaacaatgtgcatctgcatctgaatgcataatgtaccaaatgactaaaaaggacatatatttattttagtgtaattcttcaaattttaaaggagtattttagagatttaccatttttgactgcagctgatgcatctagatgcaccgatcaaagtcagctaaatattttaatttttttgaatgagttttataaactcagccaactgatgtatcaaactattctgttatattgtgttcaaacgaacatcagttatcatctgcatctagatgcatcagtcaactgatcaaacgaacgacaccttaatcatacaaactgaacattgagttcagacaacccttgtttcttggagatatagaaagatatcaaaatcgagagtaactcttaagaactcaagagtgattttgctccgcaatttgttaatcctcctagatggaaatcttaaacataaagatgtcttatatgaaagggtttaacaattgatagagatatatgagcgtgtcatcacccagcggaaataagctagataagattactccagtatacgtatgcggttatgtgtagcagatgttgcattggtagaaccggtaagtggatgtggatcatgtcacctcgccgactttagcagcaaactattctggttttaatatatgcatcaattgaagttaacaatacatgatatacactgaatcagaagagtttttgataccaatgctgtaagattaacaactgtttttggatagtaatagtcctgtgacctcccctctcacagtatggactggagctgctttatctcagaggattctaaatcatcacttcccgcatcttcttcagatgctgatctgtagacttccaccatagctttccctttatcaagcacttgagaaggaactgtttgtagaagactgtccagtgcggttaacgctgttccaagctgtgacttcatcaatacaacagttgcatttgaatctttcctcgacgcacgtagaaacaacgaatccagttcttccaatgctctatagaaggaaaagccaacataaattacacacgcaaaggtcatcatcattcattcaaacattgtcggtaccttaaacatcgatcaacatcatcagtggcggttttggagaaaccatcatctgaagcatactgagcaacctgaaagagtttgcattacacatttcatcatcaaacagaaaccaaatgagtgacatcaagtgagctttaaaaacttacagctcgaatgtttacacgaagagagctagcaggaccagaccgcaattggcgtctacacgcctcaaattcaggtttctccacattcaaaaatccctctccaacatcataaataaacatgagtgtaagttttatatagcaagagttttaagaacaaatgtgtaacaaaaaaacagagaaattttaccaagatcctggatttgtaactgagctagaatcactggtggtacatatgcttcaagtggatcaagtttcttcctattcaataactggttttaagttttagataattcaccaaacatttcaaaatctaacttcagaattcaaaggaataagcatcggagacgatttaatgttacctcttgacgtatttatccaatttatccattaagccaccagccatagcatctgatcatcatcatcaacatataaataaccaaatttgaaatgaacaaaagtcgaattggtgatattgaaaatcgagttcgtgaaattgagaatcggattggtgaatttgaagagagatgcgtgtaccgttagggaggaggaggagacgggagagaaaaaaggagacggagataactcgccggctctgtttccatggcggaggtgataatgtagctgcgcacgttagctttttgtggtttgagttggagaacagtgggaggctcacggtagcgtggagtgacgacattggggataacaccagaggcgtcttatctccgttggacaaattattattatggctatgaacattcaacatataatttaattagaaatttgcggatgaaaaagaggtaaacaattgcagaaatggttaaaaatattaacgttgtacagcaaatgataataaaaagtgtaacgtacagtgtgtaaggaatggaaaaataataatttgggttaaaataaatatgtagttttctaactatatagtactttttgagaaaagataatattatgtgtatttttattgaaacaaataaatgatttaacaaaaaaaaaaagagaagttaaaatgaaaaggaattattattttttaagttcttccttcttttgttgggcctgtgacccttttagttttagtccacttcgttctcaaagcttcaaaatattaattttgtgacaaaccgaccggagccaaccaaaccggttaacatcctaaaaccaatcatattttattaagttttgtgttgatgctaaaccaaaaatcattggcatgcatatttctaaatttagtaataaacaaaaacacttagaaatcacacgttcactatactaaaaaacgttgacaaaaacacaacaactatactaataattaaagaagagaaaactgaaccaaactttttgtaaactcctgaatttaaattagtaattgaagtaagaagatgaagaagaacatgttaagcaaacaaaaaaattacactaaaatcatataaaaatacataattacaaaagtacccataagatggatttattgatatgggtcatctgtgaaacaagccacagagagacaaagactcgtaagtattgggcaacgaaagcgacctcctttattcaccactgccattaacatgttcttcttctccttcttcttctacattttatgaccgttttacccttcaagagagagaaacaaaatcactccctctcactcactctatctctctcttctgcaaagcttcagaactctggcagagagataaaagatgatggggtttttaactttatcctccccaaataattcttcttcccttcatctctctctcttacacaacaggtccctacatttgtacaatctcctctctttaaagactctctctctttctctctccatctctatcttactctgtatttctgtcgtctgagcactcaatgaaaccactgtaaatttccgccagaatttgatgtgatggaacgataaaaatcattttttctcggttaaagtaaaaaaacaaaaacaaatttctgtagaaatcataataaaagaaagaaaaaaaatctaatgtcggtacataatacggttctcttcttcttctctatcctctgtttcttcttcatggagacttgaaagcttttaaagtatatctaaaaacgcagtcgttttaagactgtgtgtgagaaatggctctgtttagagatattgttcttcttgggtttctcttctgcttgagcttagtagctactgtgacttcagaggagggtcagttattatactgatgcatgcttcttcaagttcaagattttcgtctttttgttttatattagtgaaaaaaacttaaagatgagatttttatatgatttttgaagtttcatttggtgaaaatgagatctgggtacttgttattttctatttttgctttttgtaatggtttttttttacttggtgggtcttctatagaatcaaaagaagctttgaataaattagggtttgagttttattttgttttcttggaagttgaatttttaatcttctcaagaactgacaaatatttttttttgtttttgtgcgtgtgtgttaataaaatatccttaaaacaaaattaaaggagcaacgttgctggagattaagaagtcattcaaagatgtgaacaatgttctttatgactggacaacttcaccttcttcggattattgtgtctggagaggtgtgtcttgtgaaaatgtcaccttcaatgttgttgctctgtaagtttcttcattcctttagattactattacagtggtttttggtgttcttgtgggaaaaagttgtaatttgttttgtgtgtgttttctatgttttgtagtaatttgtcagatttgaatcttgatggagaaatctcacctgctattggagatctcaagagtctcttgtcaatgtaactgtttcaacattcactgtagcatgaaataaagtatcttactttaattctattccactctctgagttgtgacttttgtcttctgtttttttctaatgtagtgatctgcgaggtaatcgcttgtctggacaaatccctgatgagattggtgactgttcttctttgcaaaacttgtaagaacagtgattggtgttattctaccattaaacttttgttcatagaggttttatttgatgaagtgtgttcatgttgttttttattcagagacttatccttcaatgaattaagtggtgacataccgttttcgatttcgaagttgaagcaacttgagcagctgtaagtagctagttattctgctactagtcttcatatgtcattgctaaaaatatactcaccatgtggaatatggatttttactttgtccaggattctgaagaataaccaattgataggaccgatcccttcaacactttcacagattccaaacctgaaaattctgtatgttccccatgattcttacatgtcttactacttttagctatataggtgatcatacatgtgtaatttcaattgcagggacttggcacagaataaactcagtggtgagataccaagacttatttactggaatgaagttcttcagtatctgtaagtgtcaatgttttttgaagtctgtcaatgtctcttcattacccggtgataattgttgtactatgatgagcagtgggttgcgaggaaacaacttagtcggtaacatttctccagatttgtgtcaactgactggtctttggtatttgtgagtcttcttgcacatctgaatagtatgatgagttcttttgtaaatatcaaatatctgactttgttttgatattgaatcagtgacgtaagaaacaacagtttgactggtagtatacctgagacgataggaaattgcactgccttccaggttttgtatgtgcctctttctctacttctaaacatcattactgtaatttgggttacttaagaaaatctacttaactggtttgcttattacgaactcagggacttgtcctacaatcagctaactggtgagatcccttttgacatcggcttcctgcaagttgcaacattgttagttctcacctctactaatcttttgctttaaattttggctagcctttgttttcttttaaagaagatcattttcttatcttagatcattgcaaggcaatcaactctctgggaagattccatcagtgattggtctcatgcaagcccttgcagtcttgtaagtacttttcttctaatcaatgaagctacttataacattttcatgaacttaggttatatgttttcttttacagagatctaagtggcaacttgttgagtggatctattcctccgattctcggaaatcttactttcaccgagaaattgtaattctttacctgtttgttttcagtttggagtcaaatgtcataccatgttaatgatagtgatttatctttttggctttatctctaggtatttgcacagtaacaagctgactggttcaattccacctgagcttggaaacatgtcaaaactccattacctgtatgaccaaccttctcttcacttctctttttgcatacagtcactactaagttgtgtttccttatcaactatttgtaaaatattcatagggaactcaatgataatcatctcacgggtcatataccaccagagcttgggaagcttactgacttgtttgatctgtaagtagttcttcctatgcttgacatgttttgatgttcttatgcttatatgaactatgtacatataggaatgtggccaacaatgatctggaaggacctatacctgatcatctgagctcttgcacaaatctaaacagcttgtatgtatctctttctctgaaaacttctcacttgaatgttcaagattggtgctttatatgattttgtgtctcattaatgtaatgtagaaatgttcatgggaacaagtttagtggcactataccccgagcatttcaaaagctagaaagtatgacttacctgtaagtatcgacgctgagaatttctctaatcttatataatatatagttccacagcgtttgttttttcgaatttcaagtcattaactactgagtttttggttgcctttgatttatcggttcaaccagtaatctgtccagcaacaatatcaaaggtccaatcccggttgagctatctcgtatcggtaacttagatacattgtaagtgtttcttgttttctgtgaagtatacatcattatatgtgccttgtctcacatttattaaatttaatgacatttgaagggatctttccaacaacaagataaatggaatcattccttcttcccttggtgatttggagcatcttctcaagatgtgagcatccataagacctccagttttattgtttatttctagcaaaagatgaaaatggtttgtgaactcttgcattcttgttataggaacttgagtagaaatcatataactggtgtagttccaggcgactttggaaatctaagaagcatcatggaaatgtaagaagttaacttctatctgcttggttagagtttttttcatttatctcaattactgttctgaatttgtgtgtttgtggttgcagagatctttcaaataatgatatctctggcccaattccagaagagcttaaccaattacagaacataattttgctgtaagcaatcttcctcttatcccttccaagctgttaagaaattgtttttgtagaatgaaactaaaactctgtatacacaataatgaggtcactatagtgtgatccaggaacatgtattgggttggtgatctatctaatgttgtgtttcttaaaattgcttgcaggagactggaaaataataacctgactggtaatgttggttcattagccaactgtctcagtctcactgtattgtaagtaggcacctttggttctgaaacattttttgtccctctttgtgcatcttttgctaagaatataaccctgcaatcttcactaactcttataggaatgtatctcataacaacctcgtaggtgatatccctaagaacaataacttctcaagattttcaccagacaggtatggtaatttagcaggttttggtattgtgcattttgttttgtttgctaatatctatgtttatgtttttggataaagcttcattggcaatcctggtctttgcggtagttggctaaactcaccgtgtcatgattctcgtcgaactgtacgaggtgattacattcttctaaaagcttccattcacaaaacctaagataattaaagctcatgtttctatccatgttttgtctgcagtgtcaatctctagagcagctattcttggaatagctattgggggacttgtgatccttctcatggtcttaatagcagcttgccgaccgcataatcctcctccttttcttgatggatcacttgacaaaccaggtctactctccaaaccactttacgaatgttcttcacctacaatgtaatccaatagttaatccttaaatttcctggtgacatcagtaacttattcgacaccgaagctcgtcatccttcatatgaacatggcactccacgtttacgaggatatcatgagaatgacagagaatctaagtgagaagtatatcattgggcacggagcatcaagcactgtatacaaatgtgttttgaagaattgtaaaccggttgcgattaagcggctttactctcacaacccacagtcaatgaaacagtttgaaacagaactcgagatgctaagtagcatcaagcacagaaatcttgtgagcctacaagcttattccctctctcacttggggagtcttctgttctatgactatttggaaaatggtagcctctgggatcttcttcatggtaagtctcatcgccaaacatagaaaattatttgaatcttctgtgacataacaacttgcttgtgtgttttgtaaaggccctacgaagaaaaagactcttgattgggacacacggcttaagatagcatatggtgcagcacaaggtttagcttatctacaccatgactgtagtccaaggatcattcacagagacgtgaagtcgtccaacattctcttggacaaagacttagaggctcgtttgacagattttggaatagcgaaaagcttgtgtgtgtcaaagtcacatacttcaacttacgtgatgggcacgataggttacatagaccccgagtatgctcgcacttcacggctcactgagaaatccgatgtctacagttatggaatagtccttcttgagttgttaacccgaaggaaagccgttgatgacgaatccaatctccaccatctggtttgttctttcttgcctatctctctcagctgctctgtttaggtcaagtccgtaatcttgttttcattgattcacttacatcagataatgtcaaagacggggaacaatgaagtgatggaaatggcagatccagacatcacatcgacgtgtaaagatctcggtgtggtgaagaaagttttccaactggcactcctatgcaccaaaagacagccgaatgatcgacccacaatgcaccaggtgactcgtgttctcggcagttttatgctatcggaacaaccacctgctgcgactgacacgtcagcgacgctggctggttcgtgctacgtcgatgagtatgcaaatctcaagactcctcattctgtcaattgctcttccatgagtgcttctgatgctcaactgtttcttcggtttggacaagttatttctcagaacagtgagtagtttttcgttaggaggagaatctttaaaacggtatcttttcgttgcgttaagctgttagaaaaattaatgtctcatgtaaagtattatgcactgccttattattattagacaagtgtgtggtgtgaatatgtcttcagactggcacttagacttcctataagttcttgcctatctaagtttttctaaattgggttattcttgtaacatatcttagatctagtactcaacaccacgtcaccaccacaaaagatttcttatgctcaaaaacatatacatagaaagaaccttctaaactacgagaaacgttttgctatgtagtgttatatgtcaaccacgtctatgagagtgcaaacgataggttaataagttttctcacttggcaataaaaatgataaacaaatatattgtctgattaatttattttatatagtttttttataatttcttatattaattcgaactcatacagcgcgtgagactttctagtttagtataaagtacgtatttttgcaaaatcaaaatcgtaaatacatacattttaaaatgttaaaaaagataaatccgtacaccatttaaaaatggcattttcctaagatttttttcaaaaaaggcattttagacaagaactaattactacaactaaaatctactaactttggtttttatgtatacatttacgagagtctacacaaaaaaaatacataaaagaagaagtagtaaataattaaaacgtaaaaaaaaagacttttcaagaaggcagaagagtagcactgttgtgcgattgtaaaatcgtcttgattgttgtttatcccactgataagcctacccttttcaaaacttgttctaagtttaaattctatttttgaacatgacatacagtataaggctttttaaagatatcatcttgattttgtttcttccacagggaagccctatcctttcttacataatctttgttagataattttttattattttcaaaaaaaataaaattgaacataagttttctcaaagtaatatgttctaacaataataaacataatatcatttttttgttttaaactataaaggactaacatggtaaaaagttgcaatatataaatgataatttaaactaaaaattagaatatggtaactttttcttcaacaacatgccacattcggctacatgtccactaggaagtgttattatagaatcgttaatgttgggtacgcttatgaaattatcaatgtttgcttaaatctatgcttagaaaattaccaatattaccttaaaactatatttacgaatgaccaatattgcttagaactatgcttatgaaattaccaatattttcttaaaacttaaacacaaaactctttaacaaaaaaaactttatttttatttttatttttttggcaaaaaaaaaaactttatttataaagtgaaagtctccagataattttgaatttcatttttccagtttttatttagaataatttttcttcatttacaaaataaaagaaaaccctagggtttagggtttagggtttaggaaaaagcgatgatatattaattgttatgaaatgtttttttaaaaatagttaaccaaacatttttttaaagagagtttagtttcacaaggcatttgtaaattagagtaattatcaataaaaatggaagacaatctaattattatttagcaaaaactatatttaggaaaattagttaaagtttagaaatatatcatcatagtgtcaaactaattaaaattatttaattttgtgatatacgtgatcatataattttatgaatatttaatattatgatacatgtaactcagtaaacctaaatttagaagaaaagtcaaaataatcataaccaatttagattcaacttctacttttgttccaagaaaaaaacacatggtttgttttgtgggatactaatgacatctatcaaaatctatgaaaccaaatctagaagtttcaaagacaataatagctattaaataacacattaatctaatgaagatttttctctaatctcatcttaattactcccaagataaacttcctctaaaccttatttatatagatatgaagagaacaatcaaaaataaaaataaacaaatagttaaagaaaatatggggaggaaaaaactaaaattgaagagaatagagtccctaaaagagagaagtagcaaattttcaaaacgtaaaaaaggtctttttaaaaaggcagaagaagtagcattgttatgcgactcggatataatgttaattgttgtttctcccaccgagaagcctacagtttttaacactcgttctaggtataaatcattctgaaatgaagttttcaaaaaaaaaaatttatttatttcaacatgacatatatactatcatatttcaacaactgataaattaaaaataaaaataaactattgttgtctttagattttttttgtttgtttaatctataagttctaaatttatatccgtaatcaattattatttgctcaatttataatagcgcgctaaattatcgtggatatatcaaatattttgcacttgttcttgtttttattttcataaaagagttttgaaacaattataatttagattcatttttcttctttcttaattacttagaattaggagtgacatggtaattgctgtaatttacaaaaatataaaaaatgatgattaaaaaacaattgtaatagggagtgtaatattttgtattgtttttcaacaacatgaaccattaggctacatatccaatatgaagtttattataaaatcattaatttgttagttatgattgaaattatcaatacattcttaaaactcctgcgaagatatctactaattacgtaatcatatgattttgatattgcagatcattccatacaatccttgagaggttttgcatgctttcattacaagaacgggaagagaggtgtgatctttcatatttttatataattattacataagtacataggcatggttttgttttgttctctttattttataaaataactaatttctgctgattttgattcttatgtatgcatttaggagagcttacacaataaaggtatgattttctcattactttacattatcaattaaattaaaatctgatttcatatgccaagattaataattggggatatgattttttaattggtgctatattcacatctaagtttttatgtaattgatataggtttatttttaataaaaagtaaaatattatttaaatgctagaagatttacccaacttaagatattaacaaacaaataagttttttctctctctctttttgtataaatgtttcttattttttttttttttatatgtatagacgctgaaaaaattggtgaacgagaacaataccgaaatatccactgaaaatgatcaattttcgcctgaaaataatcaactttcgcctgaaaatgatcaatttttgtctgaaatggatcaattttcgtctaaaaatcaatatttatctgaaaggtatgatattgtttatactcaaacacatgaatatagattattcaacatactagatctaattttgctatatttcttgcagtgatgaagtgattcaggtacaaaaatatttattaaaaaaatttgtgacgaagatattgtttccttttagtaattgtttatttaatatcataattattgaaaatttaggatgataataaggtcaccaaactgagagaactcaaggaattgtatgctgagaagatggtaattttgaggtaacaaaaaaaaatactaatgaagattcaataaaatattcttataaattttaaccaatatttgtttactaacacaagtatttactaattttaaaggaactgggaaagcccgaataaagttacagatttgcaaggacttaatatcatggaagaatatttagtcaattctctcaaccatatcaaaaaaaccataaaggtgattgcatattaacatataataaattaaataagatttattctaaaaattcaaatgttattgaaattttacaaaattttaatatcttgtttcagattaagatccaagaagagcaacaaaactcttatttcatttagagatggagagtttatttgtacttagccgactgaagatcataggaaatcatgttctattttcttcaaacgtttcatatgtaatcattaattgaatttgaaattttgttttatattttttaatattaaatgttggatctcatttcttgtcaaccagtttcacaatttgcatattggacaatcataacgaactagaacataaaaatcaagactatctaatacaacttaagacataacttcctccaagctgcttacaaagtattttgattgacaatatctagacatgaccgcgtaaatctaacccaattgccttcttctaaaactcagaggcaattggaaatctaacaagtaattgatttcagcatctctttatgattcccaccacttttctaccaatctcctcctttgtctgctctgacaccggaacatctccaatgtacataccaaaaaatgctcctgcaatgtacacaaatctcagagcccttggacttttagtacgcaaacaaaaacgagaaaacaaataattagaatgaagaactaactgcaaagatccttgcttcggacagctccaatcaggttaccaccaactgcaaacgttggccatgttcaggtcaggtatacaataaattgcatagagaaggaagcttcataattattactcactctctgtgattagctgtccatcttctgttcgccgaaagtctattattgttccctgcaaatgagccactaaaatgagtcatactccttttatgtatgtttatatgtaaagtgtgagtgtaagcattagccattatgtaccgcgggtattggaatgtcttgtctaaagaatgaaccaaaatcattcaaacaattgaaatcagtttttggatttgcctgcaataaaaatggagaagcgtatgatgtagcaaagcgtaatccacagtgcttatcagagtacaaactacactcggtgtatcatttaccttaaccaagcgagcacgcagagatttctcgaaaacactgaaaacatagacaaacaagggaagggattaatttgccatctatcagtgtaatgcgcctcaaatcatcaaatggcaagtaaatagattaaaataaaagaaactaaaagtgagaatcaattaaggaccataacaccttcacgattcatgaacatagttcaaaacaatacaagatgttcaatatgtagcaacttccacttactctctcacagtattgatcttcaagccattgtagttaaccacaagcctcacactcataacaatatcctccctgaaaaaaactcaaataaaagactttcagacgaaatgtccaatcaaagctacaccaactaaatcagattagagtggacttcaaacaaataaaagtgcacaattctaataatatgaaaaagattgctataatacctaagaaggtctttgtataagtcatcgcatttgtcaagtttgcttgctggaaccgaggcatactttcggccaagcttctgacagaccgaggaagggtgaacatctaatccagagaagttcaagttagaagcaaaagatgacaaattgttccatatatatagaaagatacaaagctagaatgcacttacaaaaaccaaatgcatatacttttagagatttaattctgataattttcattgtccgagatcccgttgcaacaagcaccttaaattatgatgaattcaaaacgtattaacttttcgaaatttaaatcaaatctcttctttggtgactctaacataagttgtaatgacaaagaataacaaactgaggaagaaaaagctataagaacctcagaattcgatcgcgaagcattctccttcaacaacatcgggaactcgatccccgtcctaggctccactgattgtcttgtccagtctaatttttgaaaactcaaaccactatattcttcacatcccacctgacaagtcctatgttcagtgttctccggacaagtcctatgttcaatgttctccctaagtttaacatcattactccctagtggcagagcaagtccatttgcagacctaataaaatctacaatcagaaacttccccaaagagagttttagcactaaacaatattactaaacttacatgacattcaaagacggtatcatcgcagccgccaaagagagcaaagaacacgaatgtagcctctcagcttcattaacaaaatgctgaatagtggatttagatatgtttccaaagaagccaggactaatatcttttgatacatagtgaaatgggaacacagagacgttcctatgttcaaacacatgttttaaagaatcacggctcttacaagttaatccccattgatgtttagatacttctttttgcaagtttccatgtgaaaaccaacaaagcaaagctcctgtaaacttagagatacaactaaatgcttcgaaagctaagcttccaggtatatgtaattgtgaaaacaactcatgttgtaagaaacttctcttaggtaaaactgaattaggatccatatttgacatttataagcttttgaatataactccaattgtaccaaagattctgcaagaaaaatcaaacaaagacaaattctcaaatcaaaatcaatggctaacgaatcaaatcaaagctgaatcaacaacaacaatcacaaacaagccttgatctaaatggttccctaacaaaaccaatttcgtgatctttgagagtttcgtattaatcaaactaagaagcgattgttatcattatcgtataacagaaaaagcaaaatcagaacaccattggaagaaagagagaacaacaacatacatgtttcagaggattgctcgaaaacggaatcaaaaacagaggaagaagaatcaatgaagcttttttttttttttgggatctattaacgaaagagaagaaggaatattctttgacgtaagaaacaacaacggcgaagagttttttgctttcagggttcttctttcttcggtgcaattatttttaaagtcgctttttcgaatgttctgaaatcacggtagaccccatgtgttttacttttatttcagtttttacatcatattttgtatttgttcagtttcacccccatacttttttttaatgtaagaactttttcatgttaggaacattccaaaactttttagtactgataaagttacgttttgtgttgtgtttcactttctagatttcgggatgtggatgcctcattttaataataatataaccccaaaaacaagatcaaaatgagatgtttttgatgagaaaaaaaaataagaagtcaaagacagaggaatgttaacaaaaacaatgataaaatagaaactagtcgtagccatcgagacacattagattttgaatcgctaagtcttttgtcccgaaagataaattacacggtcattcagttttcgagtttttcttataataataaggagaggtaatttactagagatatgtaataataaggtcataaaaggccagcctccagtaaatttctccttcttagtgtctcatctacgagcttgaacgttttctttacaagcttctggtccaaagccgtcgtcctgtagattttgaataccctgtccactctatccggcgccgtgttctggtaatataactcctcaaacttcttcttcacaaacctgaatccaaattaaaaataaggtcatataacggtaacagtttggcgggaatcagtaaagtttggagacaagcttactcgtatgcatgctcaatctcttgtttcccacttgaaactggttggtaatctctgaaccactcgcaaacgttcaacggaacctatgcacattgaataagaaagcgttattgaacaaaaagacttgcttgcctatcaaaacaaataaatatgctttagttcttcttacgtcaagaactttcttctcaaatatgtcgaacttgttcaagaacagcatgaaggatgttttctgcgtaaagagaaccaagtttttgtaaccaaacccatctcaagagtgtctttaaatttttaaaagatgagataaaaatgtaactaaaaacctcaaaacagggttgtttcaggacccagtcgaataattccttggtctccatcatcctgtttttctgctcgtcctcaaagagcgtttggtcgtacctatgatcaaaactcagttaatgttttggcaatatgtggacagtacgaggatatcttataatttataatgaagtgagcttactcgctgatggcagcacaaaatatcacagctgttacaccttcaaacagatgaatccatttcctcctctcatttctctgtccacccacgtcaaacaatcggtacacttcaccactttttttattctctcccacagggctgcataaacgaagctttatctcatataccatttgtgaattcatctttggtaacggatcattacaagtagattcaccacaacaacaagtttgatattggtatggaattcatatgttctattagtacatcttagtggcaatcataggaatcgaatccgtaaacacttttattcatttcaccaaataacttacacatcgcagagagactacattaacaagattgttgctgagctgttaacacagctactacaaaccgcctagctaatcatattgcctagtgaaccagactaacacttagagcttatcaaacaattactcatctatgaaagactaacaatcaaacaggaaaaagggtaaaacaaaaagtagttggtacctgaactgtatttccacgacaccagttgtgcgaactcttgcataaagtacatcctcctgaaacaccaacatagaaaaaatgcaccaatgacaacacattccggaagacacatgtcacagaaattgcatattgactctggtctctgaaaatgctagctcaactaggctaatatggaaagcaaaaggcttctgtttgttaatacattgatcctccgaggctgatccaatgagttttattcaaccattttaagatcattacttgaaatgttttcaacaaagaatgatactttggttataccttagttggaatataatttatatctgatagtctcttcaagttctccatcagatatttcgtacaatcaggaacctgaagctcattaccacgagcacaagtttcctacaaaatgaaacgtttaaatcatgtattcaactttgagtgcaatagtaaataaaacgtgcacacacacacacaaacacacctgaattgcaggatccttccatagtgtttctattccctcagcgatgtccttggtaagacgtggatagtctaacctaccaccaatctcagatagtttctccccaattgcctgatattacgataataagttgactaccataagacaaggtactcacaagactcaaaactctaacaaagacagctcaagtgacctatgaatctaaccacttacaatactttcagaagataacatatatttagcagaatctgtttcattttgagcaaactcctttgttccatcatgcaataactgttcaacaatatagagtagctattaagctacatgtacaatataccaagatcaacatatgaaaaaaatttgattactcatataaatgattctctagattgtaaatccaaaagaactcgaaaacaccgccaattagaaggataaaaccgacacagtcatttcaagtattgcatacttttatagtctgatagacattggcatgaatgactggaacatagctctttagttctccttcatcaaatcccgtttggaatagaagttttatctgcaaattagtaaatttgtatcattcaattagcaggattcataagtaaatttaagtaaagagtacaatcaattttccttgtggacttgcctgcttaaaaattgtagattttccagattccccagcacctttacaaaacacaagtcagaaaattagaggaaaactattaccaaaagattcatcaaggcatgccattcacatttctaatccaaggtctacataccaagtagcaaaagcttccgaatatgcttttcagcctttgcttcttgctctatccgtctttcgatttcagcagcctgtagattaatacaaaccaagttaactcttgaagtatcagaaataatgctcccatacatcgagtgttacaagagctcttaagtcaacctgtgtattctcatcagtatcttcagtatgatgtcgacttctactgcagagtaagcccatgattgtttctatatccccacaggtaataacatagaagtcgaaaactatcaagattcaagctccacagctaaaaacaaatacttgagcttccagctacagttgcttctcataacaagacaatgcctacacctacttatgaaacaatcaatactttagctcaaaattcataaatatacataaagtttcactcaccaaaatagcaaacatgttcaaagaatgcaagtaagaaaaagcattaaactttataatatatactggattagtacctctcaaatgaaacaagttcagtagttaagaaaatgagctctaaaagtcgagtagctaacaccattaagaaattcaaaaactgtgagatagcaaatcaagtaatagatagagttcacacttgaactgctataatcagatccaaagaatcataattttcatttccaatctacagtaacgacgaactgatctacaaaaccctaaacttgaaaaacaaaaccaattcgaaacgaaacagaaaaacaacagaacaaggaggagaactaggacaagatctgagtaataaaaaacaaaactttcataaaacccaaaagagtaaatttggggtaagaagaaaagtaaagtagaattcacctgaagaagaaaaagaaatggagtcaaaggtagtgaagaagatatcggagttcgcaaacaagaagaagaagaagaagaagaaagtacaaaacaaggtctgagaagagagcagaagaagaagaagtagtacttctgcttctcctgtttctattattgttttaccactttctttccgctttaatgtttttgcttcactcttttggatttattctctcctttttattataaatacataaaatgcaaattatgaatttaattaaaaataaaataaaaatggatatatttttaatatttggtcaaaaagaaagaaagaaaatgttaagcaaaggggaagacgaaattacgccgaaaggtcctgagagagagagagagagagtggtcaaatgttgaaaaaagatgtgcctctcgtgacgataaagaagattaattacggaacctatatgcatttttattttatatactattaagttaaccattattggaagagaattactaagtgtggcaagacaaaacaaatttggaattttatgacatcaagtccttgtatcgaaatatcttgatttttgctttgcagttgcattacaagctggactctacttatatctagaatgggttttgctagcttaggaaatatattgcagttttgatttaggaaagaaaataaagattcaaaatcgataaaaacacaacatatcatatagtactttaaatcttcaacctacaaaaacatcacatccgttaaatccttacaatcattaacatcgacttgaacttctcacaaaatgtttccactgagaaacggtcttggcgagtgatggtatatttattggttgggcttaaatatatttcagatgcaaaaccatattgaatcaataaattataaatacatagcttccctaaccacttaaaccaccagctacaaaaccaataaacccgatcaatcattatgttttcataggatttcctgaacatacattaaattatttttcattttcttggtgctcttttctgtcttattcacgttttaatggacataatcggtttcatattgtaaatctctttaacctaacgaacaatttaatgaccctagtaataggataagaaggtcgtgaaaaatgaacgagaaaaaacccaccaaaacactatataagaaagaccgaaaaagtaaaaagggtgagccataaaccaaaaaccttaccagatgttgtcaaagaacaaaaatcatcatccatgattaacctacgcttcactactaagacaaggcgattgtgtcccggttgaaaaggttgtaaaacagtttgaggatgctacaaaagtggatgttaagtatgaagcggctaaggttttggatttggtctaggagcacattggttaagcaatatcttcggtggagattgagtttttagagatagtagatactaattcatctatggagacatgcaaattcatcaaaatgcttggatgaattagaaaaactaggtggagaatacagtaaaaaaattcaaaaagtgcatattgtttggacaacattaatatgtacaaatagtttacatttaaatgtattattttactaattaagtacatataaagttgctaaactaaactaatataatttttgcataagtaaatttatcgttaaaagttttctttctagccactaaacaacaatacaaaatcgcccaagtcacccattaattaatttagaagtgaaaaacaaaatcttaattatatggacgatcttgtctaccatatttcaagggctacaggcctacagccgccgaataaatcttaccagccttaaaccagaacaacggcaaataagttcatgtggcggctggtgatgattcacaatttccccgacagttctatgataatgaaactatataattattgtacgtacatacatgcatgcgacgaacaacacttcaatttaattgttagtattaaattacatttatagtgaagtatgttgggacgattagacggatacaatgcacttatgttctccggaaaatgaatcatttgtgttcagagcatgactccaagagtcaaaaaagttattaaatttatttgaatttaaaacttaaaaatagtgtaatttttaaccacccgctgccgcaaacgttggcggaagaatacgcggtgttaaacaatttttgtgatcgttgtcaaacatttgtaaccgcaatctctactgcacaatctgttacgtttacaatttacaagttagtatagaagaacgttcgtacctgaagaccaaccgacctttagttattgaataaatgattatttagttaagagtaacaaaatcaatggttcaaatttgtttctcttccttacttcttaaattttaatcatggaagaaacaaagtcaacggacatccaattatggcctaatcatctcattctcctttcaacaaggcgaatcaaatcttctttatacgtaatatttatttgccagcctgaaatgtataccaaatcatttttaaattaattgcctaaattattagaacaaaaactattagtaaataactaattagtcttatgaaactagaaatcgagatagtggaatatagagagacaccattaaattcacaaaatcatttttaaattacctaaattattacaacaaaaactattagacagaactaagtctataatgaaacgagagatcgtatttggaatgtagagcgagagacaattttcaattcattgaatatataagcaaaattatatagcccgtagactttggtgagatgaagtctaagtacaaacaactgaatgaatttataatcaataatattgattatattgtgattagaaaaagaaaacaacttgcgttatttttcaatattattgtgaggattaatgtgaacatggaatcgtgtttctcctgaaaaaaatatcagcatagagcttagaacaatataaatatatccaccaaaaataacttcaacatttttatacaactaatacaaaaaaaaaaaagcaaactttttgtatatataaataaatttgaaaactcaaaggtcggtcagtacgaataagacacaacaactactataaattagaggactttgaagacaagtaggttaactagaacatccttaatttctaaacctacgcactctacaaaagattcatcaaaaggagtaaaagactaactttctccattttttccccaaataacacaaaagaagaagttgaaaatggcagtgttcaagaagaagaaaacatcattgacatctctgttcttggggtgttacaaggcaaagaacgcaagcaaatacgaaggaggggagaaggctgtaatgaaaataagaacttgtccagcgttcaagaggctgtctttatcggacataagcgatccaagctcgcccatgtcggttatggatgatctctctcactccttcacatcgcagaagcttcgtttgttcacgttgtctgagctgagagtgattacgcataatttctctagaagtaacatgttgggggaaggagggtttgggccggtttacaaagggtttattgatgataaggttaaaccgggtatcgaagcccaaccggttgctgtaaaggctcttgatcttcatggccatcaaggccatagagaatggctggtaacatttctttctctttatgtatgtttttgtctacattcaagacttttctattcacaaggaacaatttaattacgaagaccgtctcgattattttatatattttttgaattttggtttatcttcttaattagctatatgaatctggccatttttcagtatgttattaaatatatatatcttttgtgaaatttcttcataaagttttttttttcagtgtatacaaaatttatttttgtttgcaggcggagatattatttttgggacaactaagtaacaaacatcttgtgaagctgatagggttttgttgtgaagaagagcaaagagttcttgtttatgagtacatgcctcgaggtagcttggagaatcagctctttcgaagtacgtcatctactatatttttacctaacttgctaaaagttgtttcaatttttgctatatatgttctagaccgcgttacaaaacattttttctgtttaaacctaaaagaacaactccacgaagactttaattacgttttagttatagaatgacaagaataaaaaatattgaagaaaagaatccatatggttcacgttaacttcgtcaagttcttactttatttatgggtcgtacactacattaataacttcttaaaaaactatatattttttataatttagataatattcaatagtattactaactttgaaaagtgtgtgaattgggacaggaaatagcttagcaatggcttggggaataaggatgaagatagctctcggagccgccaaaggtttagcttttctccatgaagcagagaaacctgtcatctacagagactttaaaacctctaacatattgttagactccgtgagtttttttttcctttttaaattttgtatccactattaaatcaaattaaagtggtatttctcaactgactctttgatatttcaggactataacgccaaattatctgacttcggtctagccaaagatggacctgaaggcgaacatacgcatgtaactacccgagtgatgggaacacaaggttatgctgcgcccgaatatatcatgactggtaacatttttgtaaggaatttatttcttttaccgtgaagcgatattctttgagatatgtctttaatggtttacatgtgttgtaggtcatttgacgacgatgaatgatgtatacagttttggagtagttttgttagagctgataaccggaaaacggtcaatggacaatacccgaacacggagggaacaaagcctagtggaatgggcgcggcctatgttaagggaccaaagaaagttagagaggataattgacccgaggctcgcgaaccagcacaaaacagaagcggctcaggtagctgcttccctagcatacaagtgtctaagccaacatcctaagtatagacctacaatgtgtgaggtggttaaggtcttagagtctatccaagaagttgatattaggaagcatgatggcaataacaacaaagaaggaaagaagtttgttgatataaataagtttaggcatcaccgtaaaggcaaaagacgtgtgaacatcgcttattcagattctctcgtttacaaggaatccaaggcaaagcaaaacgatggcatttgaaatacatcattttctcatatgaattattaagcattcatattctatgaacgcaattcttatcttaagttatgaccattcttccaaaaatttgaaggaaagaaaggtgatgttataagtatcctagttctctggtattttagattaatttcctttacataattcaaaaatactttgtacaaaagagtcatgtacaagaaatataaaataaatgtttgtaaatcatatatatatacaccagtttgttgggcggacaacgttgaagttatttcgctctttaaaacatagtagatgatcacttggttggttattatggagattggaattgcaataaaatcaaatcatgtatggtacggcagctacccctagattattcttggtgattccaatgaaattatgagctcctcggagcactctcgttttcaagattacatatgaaaccgtttgggtatatttgagtttcagaatgctgtataaatgtaataaattattaaatttttatatttattttatctatatcaacaataagtatacttttttccctagatgacttaaattcaaagcaaattaacaataacaatcagtttgaagattatttttcctaaatataaatataattgtataaactttaattagatttttaaaataataagctaattcaggatattcaaaatatatagagaaatcttattaaaaaaaaaaattagttgaaaggaaatagttaacctaataaaagcaagtaatcaaagcccaaaaatttacaattaaaacccttagtgataaggattaagtgtcattagtagttaataaataaatgttgtagatagatggagtcactaaaaaaaaaaaaggtcaaaacgagaggcgcaaggtttggtgtcttgttaaataaatcttgtggtgctcgtgttacctctttagccaaacaacacccccaaacaattactcttatagagagagtagaagaagacgacgcttaccccaaaactcgaatccctaggaggtaacagcttaagctctccgattaccccaaactgcaaaatttctcatctttctctctctttatcttgttttcaacagcagcctttacctttttcttttaacctctgatcttgttatcttccatggatccatttccttaaaggtttgctctttctttcagagatattcttatctctacgaatctcatcttgatttgggttcttcttttttgtgtggtttaataaatcacaaatctgtttttttctatcttggatttacttaaaaatcttgtttttaataaagggttttcttttatttcagtcatttaaagatacccttattctagaatttagtagttgtgtttcaaattttaagtctttatgtgtttgtctggtaagaactataaaaaagctgcaatgggttttgacttatgagtttgtagccactgaaaatgtatctctttttcttgtttaggttttggtaatatgaattgagaagtccacgcacgtgtgtatctctattaccgtcaggtgtgttacctttcttctctgagtaatttgtttgattaaagcaaagtattttgcaggtttcttctttgagtaatttgacttagaaaagccaaactcttttttttgcagattttggtttaaaagcagttatttttactagtcttgtaagaatgagtttaacaaagaaagcaagtgaaccaaagctaagtggtactagtatcaagccaacaactttaaaccctcatgctgctgagtttgttccgtttactctacgttctccttcatctggaggtacaagtactttggatacaagacttttagcttcttctagttctgttgggaaagcggttttggacaggacagaatcatctgcgtcacatcattcagatgaagaagcacgtcagttctggagtcatcaacttcctgatgatataactccagattttgggttgatgactcaagatgacaattcttatggatctggtagtttgtcactagctaacttgtcgttgtttgacggtaatgaagctgagaagtttccttctgctagtggaggatatggcttttcagatcaaactggattagcttcacataatgctaatggtaatagcttggctgataagagtagatatcccatttcttcatttggggaagatcctcagcgacagagtttcatgcaactgagtccaaagccttgggataagcaaatcatgaatgctgagcagcttcttgggaatgacagggaaagaaacccttttagtgggaaatctcgacatggctttgttaacgacatgattactgagagtccaggggatatggaggtgaaccctgtggattttctcgcttctcagttccccggattcgccgctgagagtctagcagaagtttattttgctaatgggtgtgatttgcagttgacaattgagatgcttactcagcttgaggtattctcctattcaatatatggcatagcttttattgatgttatgttattaaattctatgtttattttcttctctgtatagctacaagtggatggtggcttgaatcaaaacataagccctaagacttatgctcctcctagtctaactccaatggattttcctgcactaagcatctcaaatagccatggtattcctgcccagtttggtggggatgatttgcaacaaactggaaatcattaccaatctcctgaaaaggataacatgttcttcttcaagtcgggaccatcggtttctcagcctggtgcaatcgattatgtttctgctgtcaggaagttagcatctcaggattctggtatgtggaaatatgaacgaaatgattcagcagactcatctattggctctagcaggaattctggtgcttacaaaagtggccgtgggaggagtatatattctgataagctgcaaagtcgagcccaaactcgacctgctcctgtttgggtggagaccggggatgctgttggtaagtttcttcttttaacaaactttattgcatagacaaataactatatgagtcttgttatacatctgtattgaacatatgttatcttattcgacgatgttgcatttctggctctctcttttatctggggatgaacaggcaatatgtattctgagttacgcgaggaagcacgtgactatgcacgtttgcggaatgtgtactttgaacaggtataatatacttggaaatgacattttactcatttatgtggcctctagttgttctgcagacctgttgttttttgcaactgggaagttccatttggtacatacctgtctattaatgttaaggccgtgtaatgtggcctaaccttgaggtctattgtccagattgatttttggaaaatacttcgggtgtatggcgtagtgaatcataagtatttggaatcttgcgtgcaatttatgatgatagtttataaagctttttgtcaatgatggggttttcaccggttttattacttcgacgtcatcttattaacctgttatctttctgtcttagtcatgtacgctcaatattctatgttgcttctggttgagcgtaggcacgacaagcataccttgttgggaataaggccttagccaaagagctaagtgttaagggacagttgcataatatgcaaatgaaggctgctcatgggaaagctcaagaagccatttaccgccagaggtttgacttctttacctgcactgcatctccttgtaacatgatcttttatccgaaacacacactgatatctccataaatgaaaaacaaaactcctgttctcagtatctctgttctaacctgcctatgagtaaaaaatgaaacaggaacccagtgggtcaaggaaacagtagagggaatgagagaatgatagacttgcatgggttacatgtgagtgaagcacttcaggtgttgaagcacgaactgagtgtgttgaggagcacagctcgagcaacgcaagagaggcttcagatttacatatgtgtagggacaggccaccacacaaggggttcccgcactccggctagactcccagttgctgtacagcgctacctactcgaagaagaaggtcttgactattccgaaccacaggccggtctccttagagtcatcatatactgacagacaaaagccaggtacttatataggatacaagaccggaaaagaaaacaaaaaaaaggaaaggtgaccacgctattcatttgttgtatctgatctgtacatgggaagagaggagaaagagactagctgaaaatgaagaaggaaaaaaaaaagtgttaggaaagagatccgcaagaaggaaggaacgaaggcgtatgcataaaatgtttaggtttgttcagttaatactttttgtagcatcagaggatcgatcagacctctttctatctttttgtcgggatctatacgatgttttgttgattctcggtgcttttttttttttacagttttactctatatgttatactcctttcttctggaaatgcttatatttgtaattctcttagatttaatgtgcatcactaagttacaaattcatgagtcaaaaagtaaaattttgtactttaaaaagcttgtttccagttatgtattgtaaaagagaaatcaagctctaatcataagctcataaacattactgttgttctctccattcactcgcttaagcatttcgaaacttttcctgcttcctaataactctattcttgggaaaaccaagcatccttcatctgatgtctctttgctgcaatacactgttctgagacggtcagcgtgcctcgagtctgtgtgaattgcaacttctatttcatgatccggcaagttctcctgcagaatcaatagacacaagagatcttcttattgtgaactaaacggtaacatgggcctagtgagtcaacagagatagtataaatactaatcactcataagttcctaactaagacgaagaaattgattctaaagactctccttttcatagcaactaaaaggaactgaaacgagaaattggccattcgaatatgatggttatacctggtaaaatctgtagatatagtctaagatttgcaggcaagtgaaaccactatcactgaaataagtccgtgaagaaggtcccatctccgagaaccgatcagctggatatagaattgtaaggaagctgtctttaaatatcacttctgtcttctcactgcagaagagcgcccaggaagaaaaaaaagatagttgaccacagtgagatatttccaggattgcaacaatggcagcaatagatagtagtagactatcactggaacaatttacttctaaagtagccatgtaaaatctaaaaaatgaaggaaaagagatgtacgaagaacgaaacagtacctctcggttagtgctctggttgaatttgaaaaagaagccactggatctaaccctttatctatcccatcttgtacaacagaaggctggggttcactgatgtcacgactgctgctgtcagtaaaaatagtggcggctgaagctgcttcagatattgtccagcaaatattgtccagcaggctgtactgtgttatgcgtcttattgggttttggcaagtctatgggacatccagaaagagaacagacaaattcagacactatggtgaatttaagacatcagggaagaaagagaaagatcatcagttacctgcatatggcgagcacgtcgtctcctaacccccgttttagctatatttacagtctctttccgttcttgttttgataaacttctggatttaaaagcctcttgagaattaccttgcccggaaattttctgtgagatttatacagagaaaggtcgcaactattactctcatcacttgaattgaaattacaagacgggacaaggaaacgtaggaagactgagaaattatgtgcaaggatagagaatgggaaaattaacttgtaaggacagtagaaatcacaccatatgaaaagataaagtacctcatttgccgcaccatcttcaaaattttcaagcattaatcctaactgtctagctaaatcaggtgacatgtgtacaagtctttgtcgatgtttctccactgttttcagaacccatagtggctgatgcaagaaaaaaaaaaacgaaattaagcatgttaaggtcatcatgaaacaaatctgttaatcgactaggattatctttctcatctagctcactatggtcaatagtatgacaaagtaacagagcaatcaagtcacatttacatgggattgtgtatcaaattatccacattttcatagaatatcaaaacaagcggaagtacatcttctggagaatacattacaattctacaaaaatgacataaagaagaactcactgagacaatggttttggcatggccaaggtatctctgaatagaagcaccttcacacacgacaaaacttgcattgcaaccaataaaccatgaatcgatgacctttgctccttgctctccagcaacctttaacacctaaacagaccacattctatttaaagaagctcatagaaaagactgtacagcctggccaaaaagttaaaagcacccaatgtgataaattaccttaaggcggagttcatctgaaatgtctgaatcaacatacatgcaatggtcagcaagactcatgtctacactagtgccagactctgttccagaagaagatacttggtggttcttcgttgatgtgccaaaatgtacagcttgaatttgtcgaggacgacaaatagtttcgaggtcaaaaacccggctcagctcatcccccttttcgcaattttgtctaagttgtttaacattgtaaagtgattcgctcatcctgactacaaaattacagaaaaaaatatcaacttcagacacacataaccttttaacttagttagaatatccatgagctctcttttccaaagtaaatttgttctgattgagtttgatacactacaaacgaactgaaactatttagactatttcaatatcatgctgataatagatcacagaatatctttagcaaactaggagaagccagtgtaggactgctgactagaaggttttattcctctaacaataaagttgaaagagtcaacacaaagtcaagggtccatgaatttgctagcaaagctttcacaaatttgtaccgctatgaaactgaggcagtaaccagcaaaactgaatggtcaaatctatgatactaactctggctaacctataaatccttgagcaaatattttaaacagcattgaaaacttacagttcctcttgacgctatctacaaaccagccaatcgtaacaacaaagagaccatttcttgccccatgtttcaaagtgtgctcaaacttacgtccacatgagctgtaagtttccgttaagcatcccaaaaggcaccataaaatgtaacaaaatgatacgaaacaaattatctaaagaaatgctttagaaggacgtgatcatgtttgtttctgtagtcaaaaccaaaattgaataaagatcaacagaaatgagaaaaaggatatctgaacaaccaaatgagtacatcgctggtgaagatgaggagtgtactcgcctccgagtctctctgtcgcttccttgacttgttttcttgcatctgcaaagaaacaaagcaatttaacatatcacaacacaaaaccaatgttatgaatacaacaagatcacattcacaacagcatctgaaatctaaagattgattaacataaatatcctacttctgagttctgactaatggagattgaagaggaacaaattctttaaatttacaaacataaaaccaaagttataacaacagaatctgaaagtctagaagaataaaactttaatattgatggaacataaaaattcaaactttctgcctaatagagattgaaaaaggaacaaagtctttacctttggataaaccagtgacacaaatgacaagagaagagaatggaccattggactgagacattgaagtagtagtaagaggaggagattgtaaaacaggaaacaacttagaacaaccctttgaatcaatcaaaccaacatttcttcttctgagagcacccattgtgatagttgatgatagacaacaaaccaagctccaatctctgcttttttataaatccttaattcaaaatacggaatcattgcagaaagactaaaaaagaatcaaaatcaaaaggaaatcactttctcagaggaaaaagaaatcggggaatgtaagaagaagcatgaaaaggattcaaaggagaaaaagattttagggttgagtgattgtggacaaaatggtgctttaagtgatgaatcctcggaaaaagatggttactttggttgtcggagctttttcgtggggctaattttggctttatcggcgtgattccaaatttggggaatgagagacaactactctttctattcaaaactctcacacaacgcttctttgcaagtgactagtgagactgagagataactcttgtgattcaaaaatagttgggcttgacccgacccgacccgacttctttttattaattacttacaccaaaactcttgtaattataacaagtcttgtaattttggctttttaataaaagtggagtgataatacaaattttaatttgtaagcttctgtttttagatggatgggatccagttaaacatttctatttatttttataattttttgtattattatttattttcagataatctttattttttaacaactttaaattaaactcaaaagaactacttcggagatatgttgtttacatatgtaatataacgtggttctgtaagaatttcatatgctaaattattcgctttaacatgtgtacaacaaaatattaacaataaaattgaagcttaaaattttttctttattcgttatgaaattcgtctctatgattttaatgatattggaatatagttaactcaatttacattaattacattttggatatttggaaaggaaaattcgagaaatagacttacaacaagtagataaaaaggctgccacttcataaagttggtctttactaatattttgtcattaaattcaatattagagttgttttgtggtttgataatctatcaattgattctatattcaaaggcacgggactaaggacatgtgctttaggaatcaaccttgcgaatctttcttctctcctttctttttttcacaaattcattcgatttttcaatgcttactttcatgttagaggacaaaagttgtggcttaatagggcatctctcaacatccatttttctccaagcatgtaaacaaagaccaatagaaatgagtaaaaaagagattcacaaataataaaacttgaaaaaagctcaaaccagagttagaggtcgttggaaacaaaagaaaattacaaatgctgggcaaaaaaagggtttttagtcatgtttcttgcttccgaacaatttctcatacacatcggatttgtgcttgcatgcgaaagatttaaaactcaccactattgagtcgatctcttgctctttcttttcgtacacgagaaaagcaaggaaggcaatgggcagtcctgttgaacaaaaacagaacaacaaaaccagttattgttgaagaactataattcatacaaccgtagcgttggcatgtagtaaaactagatagagagtgagtgtgtacctataacaaatatgctgtgaagagatatggctccagccaaactcaatgctaacaaaacgaagaccacctatgacattaaaaacaccaaagcggtgttacaatattattaccaaagagaacttcagcaatcgaattttgtccctatttctgtttcaggttgggataagatatcgtacgactggaacttgccagcaataactagttcaaggaaaaataccttgaaaaagaagctccaatcattcccctggcaaagagatcttaaagcttttacagtggtgttccatgaagagatcactgacaatgagaggtcatgtgatgagtcttttgagaggtgaaattgcgatgcaggaatcttttcaactgtataaccaaatctgcaaaataagcatctatattcagttgttcgtaaactgaaatagacagcaattgcttatattacttgttcctgattgaagagtacgatacacagtgtttcaaaaatgtttggcatataccttctggtttccattattagagaactaggttaaggtagttcatattgcacataaatgaaaatctatcaaaagttggcatctcaggaatcttacattttctctggtagaatgccatggaggaacaaaaatacagatgctaccaatagagccttcgaaagagcagttacgacggtagacccagttgcaacaaagttataatagatactaattagaatgaatatggcaataagagtctgctttaaatccttccagagaagtgtatcagcaactgcaaaatcatgtcagaacaagtgaatcaagaccagggtagatttgaaaatatgtctagttctactaacatcctatgcctcttcacattaatatggtagctagccactgaacacaatcattctcaggagagcgtgcagatgttgacgctgactcaagattttaataaaaagaaaaatatccagtgaattttaaaaataaacattgggtgcttatcatgtgagagacgatcagctgagaggacaagcatgctaattgaaatatatggtcataccctttccgcctccaagaatcctagaagccttggatgggccctctcttttggattgacttccagctgttaggtgagagaatgagtctatcgtcctccgtataccttcctgcaggatcatcaaggcatgcatgcaatatataaagaacaataaaggcttcaaatatctctctctttcaaatcaaatattgtataacctgaagtgggaccacaggagcatagcctagtcgatcctttgctttcgtggaatcgaaagttctgctgcatgagagaagcctaactcttgaaggtgttagttgtggtactgtcatcccatatggtcccaacactttatatgtcagttcaaccagatgcgcaatcggcatcatgataaacgcagggatctttatgcttggcctgcaaaatatattaaaattaagaagaacagtcaaaggtatgggttaagtacaatgcattccttcttagataagtgaagccgtcaaaaccaatttgacaaggtcagaaacctatatcccaaagaaaatggattacatgaaatcagaaaacttgtcaggcacaaaaatgtaatcagaaagtattgtatatgcccaattactatgaagtatgcacaataaaattgcaagcagaaatgtaaccttataaaaatgtaagcagaacaaaaatacaaaactgtaagcagaaatcattgtatatactatatacccaattattttgaaggaaacttaattatatgctacttccggatagaacgtcaagtcaagctcaactcaattcccatgcaagaacataaataaaatgaaactaagacgtgtctttcccctttttgtgtatgcaagatcttacaagtatacatgacactagttgcaaacccaaacaaaaaaagggaaaaacataatacctctcgtaaccaagtccatcaaggagctgtgacataaattcccaaaatttaattggctccatgttggtaatgaaatatgcctgtaaatccactaaatgtcaggttagcctacaactaggattttcctacaacatcataaataaactaccatctcactggacgccttaactaaattttattcaagggatttaactttattcaaatacggcagtaaacaatgttatcatcaatagataatttggcaaacatctcaaacggatctatctcagctaaacacaacagacaagaaaaataatctcgaacgaaaaaaccagcaagctctttgaagttcacataatgtttgagtagacacagtttttatctcagttttcatggtatgcctgaaacgtttatgctttaggtatgcattaacagctgtacacaaaaatactggttgaccatgacagcatttcattccaaacatttacagctagaaaactatggagaccacaaatataatgatgtgaaactgagaccaaactccaccttagaaaactacggcatggaatcaactgaaagcaaatacctgtcctgcagcttttgtagaaacatctcctcctgaagctagagcacgctcagcacaaacatgggcatgagcaacattctcaacgtaagtgaaatcatagagattattcccatcaccaataataaactggacagtaaagaagcagaaaacagtcgtatcaaaaataaaaataatgaaagattttatgtcaaagaagaaatccaagcaaacaatgcatcttaacctattaaattcattttggagagatccatgatcatctaaagcacctcttaactagcagcaagataaaagactaaatacattcctactagcaaagccataaatcttaattaggaaggaatatcgcaccgcgcaaccaggaaccctccctcaaatcatttttcaagtactcatatgaatgttgctttccacatcattctttgtatctcgtgttaggctacttttaaggccatttcatcgatgccaccaagcttaggtttccaaagaaaatcatacatcctaatggtgtccagacatatagaaagttcagtcctctacatttgtagcttaaagcttcaaatttagaaactttgcgaagtcaataccccaaattttgcgtaaaacaaacataaattattctctctccgctctactgtcaccaaacgatttcacagttatggctttaatggtaaaaaaaaattctccattccctgtgaatcaatctgtgtgtttccaaagagttaatcataacttctgagaaaaacttcatagtacagaactatctaccaaatgcacagcatggtcatgactttcaaacacgtttagataataatgtcaataaagggcagctaccttcgtgagagtaacaaaagtatcaagagaagagagaagaggaaaggtaaaaaaggtaaaaaggaaggcagacagcacatagaggagcaaaacggtaaacaaagaaaacaatccaaccttagatttcccagccctagcagcagcaacaagcgacggaaccaataatctatcaccgggaccaaaaatactgcttggacgtatgcaacaagtgagtagtccatttctaccattagccttcatgatcaactcttctccttcagctttagttgctgaatatgagtcattgtgctgaatagaatgaagaaaatattagtaaccaaactccaaaacaagcaaagaatcatctcaaagccatagttctgtacaacaatagaaagacaaaacatcaaattcaaagttcacaccaaaagcgtaattaataccttaattgggtaagccattgattcagtaccgttcaaaataccatgaacaccatcaaacacaacactaggagagctagtgtaaataagcctctttactccaacatcaacacaagcatcaatcacattttgtgtccctgtacattaaaaatcccataaacacaagaactaactgaattcatcagtttgacagaaacgaaatgtgcaaaaattgaagtttctattaaccttgaacattcaccgaatactgaagctgatgattgttaatagaagaatctggagctgccatatgaaacaccacctccgctccctgaaaagctaatgggaacaagtaattacaaagatgcatagatctcaaagtccactaagaatcaatgactttgtgattaagaacctttaacgacttgagatttatctcgaagatcagcggagatatattgaacacgaccagatcttaatccttcgtcgagaactccgttcccttcctgaggatcaagcattatcgccggagctaaatcggcgatacggacgcaaaacatttcgtagcgtacgagcatttcaacaagatgcctcgccgcgaatcctctaccgccggtaacaacgcaccatcgctccgtctccgtagctgccggcgacatgtcttttgaatcgagtaagcaaaaatggcgaaatcagagaagcatttacctttgagagaaagagagagcttgaaaaatcttttcaggagaaagaaaacactgctttggtgtgtaatgtgtgcctcccacaacctttctgttccaatctatttttattgttgggaaaacaaaacatattgggctttcgaatttttataagattctgtttaagtttaaacccatatgatttgggatttttaatgtgatttaatctcaaggtttatgtaaatgaaaactgttttaagattggttttggaggggtttgtaacaaaaagaaatgaaaattgttcaaagtttttgtgaaagtgtgtttttggtcataatgaaaatggttaagttgtaacaagaagtcgaatagtaaaaatatttttttttgttataagtaaaatctcattacaatagtaatataaaataaattaaaagattaaaaaaaataaaaaatatataaagttgcataaataatcgcaaatatagttttatgaccattgtttcttcttcactcttcatgatactcttttatctttttattctttaatttcttatagttttaacaattgttcttctctcttcaggtgcctccatccttctccatctccaatcccatctaatttcatcaaatcccttccatttataaccatgaatgcaaaaaaaattagaataaaaagctagattataaggtaatcttcgtttctagacgaagtcacaaaacttgacgagatttgtgtgtcgaagcatgaacctctctttcagagttcttcaatttcatcatcttataactatccatcacgtttttgtttttgttatgattggtaacaagcggttaaataataagaaaattgttatgaaaatactataactaaagttctactttttttgctaaataactaaatcctatttaatattgtcgcttatgagaggttttcttttgtatcctttgttaatgaaagaaagttccacatcaaaaattggaggaattatcaagtgatatatagaaggttcggaccactccacctattgtcaattggttttaggttggaagcccatgttaaacccagttctatcatcctcatccattgaatttttgtgaatttatatttgatataataataagaagggccacaattatttcatattttagccatctttatcttagggttgactgtggttatggtatgtaagtcaacgggagtttagaaccatgactcgttggataagattggatagtttttttatatttcacttcttaaaccgtttctttttggttgtatatataagaaaactactagtattaactattaagtctgaaattgtcttagaagattggttcgataatcttctcttatatctacaacctcacgtgatcattttctgttgcactatatatagactatagagtatagacccttcttcttgaaacaaagctctttttttttgttcaagtttctttcctgatataagcgcaatgacagagttcttgaaacaaagcttttttgtgacaaccaaaaactaaatcctttaattatttttctttgctaaatgagtatgtatcatataagatgaagatggttcggatttccatgttcattacctatgcttttggtttcttggcaaaacctataaaagaaaaaaaggcaaagaagtaaaaacaatatttagtcaatcaaatgaaaaatcttcagtcatttatgaacaaattcaagcatgcacgtacgtgtttggatcttattttggtaaagtttattcactgcttcatttgttttggacttctattttttatttttttatggcctacaaaattcatggtccaaaaggacctaaccgatctgaaattgtttttttttatttaaaaacaatacaaaaaagagagagggaaataataataatgtgcaataatggtataaggggttgcttcaactacttcccgtaaaatgcatcagccatttgactcattaaagaagacagccataagttagatatcatcataaacatttcaacatccatacctctcttgtcaacattactaatttcccatacgtcttagcaacttcttttaacagcaactttttttccttttcaagtttaacctaacaatgttttgatcacatatcaatactacatatttagaatatatatatgatgtcgtgtttcgtttgtggattttgttttctcatgatttttaaaatcccatgtttacacgatcataacgtttcgtcaattttaaaacgataactctataagtaatagcgtgtaccttcatcgtatttctttcgacgtcgtaattatgatcaccattcaccattttccttcttttttctttttagggtatataacgcaactatataaagcacacgtacttaaagaaacccatttgggcatgtgttgtccttgctgtggatcacatgcataagtctgctttttctttttaatatgaattgtttttgacttcatatataggaccaattcaaacatttatatttaaagaatattttactcagtattattactttcttttgtaatgatttacaattttgtgccactcgtatgtatagcgttttaaagaggttacttaccagtagtttttgtccaaattttatatgtgaaataacccttctcggaaggctaccacatttccattaaattattggaaaacttttacaaaatgtgacaattcgatcggaaggctactatctcataggtattgaggcaggatagtcactaagttaatgattctgcatcggtcacaaacgtggtgatcgacgtgaaaagattgagccctcgcaaaagtgagatggtgctttgtcaaacttttgcgataagtgatcatgataattacaaattaaacttcatttttgccgtttatgtgtcacttaaaattatgttttattttagttttcttaaatgaaaaaagagagtttatatatatatatatatatatatgaatcaaaatgttagttagtggatcttttgattctgaaaaattgttggatatttgtttcctcgcttaaattggtatttatagtagagtttgaatcgaggatttgaataggttcaagaattattttaccctttggaagcgtcatctcgctttgagttctactacgatgttatggttagactcccacggtgggagttcccatttactcttaaatgcaactgaacgggctttactatttgatgcaatgatacaaagaaccttcagatttaaacaatgagacgatcgcaacacaagagaataatgttactgatccttctacaacaaacactgcaccaaggcctagtttgcttgattgaatgaagtatacaaagcatagacacttatcacatttaaagtatttgtaatatggcaatttcgtatgtgttaacacatttctcaaattttaaaaatcgtttatatggatcttataaaatatggtagtaataatttaggtgggggattgggtcattatttatttctcttctattttgctactgcattaactaatattaggctaaaagttccttaaataataaagcttttttatgcgtaatgtagccgccctcatttatataggtctcaccaccaatcgattaattgtaagtaacagaaattgttgattatagttaaatgagtcgttgataatttgtttaaatttgtaaactcttcaggcaaaatttatattatgtgaacaaaattgccatatatttcatatcatgaatgaatttggtctaaacatactccatactgtcaaggtttaaaaaacattatattcatacaatcataccatgaatgaatttgtgtaaagctgtaaactcttcttgcatcctagctattttcctcttcttcttttttctttttctgactagtcatatagattttttttttgatttttatttgatcgttggagaatcttcaaaagatgactccactcatcttttcaaaaactacctagaccatatacagggctctccgtctacaacaattagcgtccggaaaacgtaaagaagtctacaacaattagcgtcctcgtggatcagtatcgtgacatttgtgtcatggaacctatccttggcagtcgaagttaggctcactcccaacggtctaacttctaagtgctcactaaaatatgaaaaactaatgttctcgaacaaacaccacctataatgactcaaccctccataaaattcgaaaactgatcttaaacaaaaatatatataagtgacgtaaaacataaatttatgtatatctattaaataataaattagtgaagtaaaacataaacttaatcgcataaaagtttaactttattttgcttctcaatagattttgactacataatagacgtggattttagtcaaacacaagcgatattgcaaaatttccgatatatatatatacacgtctttttcactaatagaaaagtaaacatatcagctcatcttttctctattggcagttctcatcatcttaattgaaaatttatgtttccactttttttagcttagatacaaactcaactttgtaaaagattttcttgttgcatattaaattttacatcacaacaaaaagaaaaaaagaaataaacaaaggagatcaaataggttgtacataaattaagcaatcatacaacatcaaatcaacagctaaaaagttcagtacaatctttacttccgaatttacttcattgtcttgacatcatgttctaaacaaaaaccaaaccaaagttctccacaaacctgtcggtttttaaccaaaccaaagttactagcttaattcaaaaaaaaaaaaaaacagaactgattcagaaaccccaaattgacaaattgtcaaattgtcaaaaagtggtcatctttatcctttgacatctggttagtataaaaaattgtaataaatgcaaacataagatccaaaactacaccttattagaacggaggaattaagagtgacataactcactccaactacgaccagtacaagtagttggcgacattaactacctctcaccaaccaccaaacccaatccccacaatattaccattactctcatataactacacatattcatatttacattttttgccaacacaactccttataagatatacacttcatcaacctatagatctcactcacataatcaacctacaaaacaaaaacaagaatgggtagatccaacgagcaagatctgctctctaccgagatcgttaatcgtgggatcgaaccatccggtcctaacgccggctcaccaacgttctcggttagggtcaggagacgtttgcctgattttcttcagtcggtgaacttgaagtacgtgaaacttggttaccactacctcataaaccatgcggtttatttggcgaccataccggttcttgtgctggtttttagtgctgaggttgggagtttaagcagagaagagatttggaagaagctttgggactatgatcttgcaactgttatcggattcttcggtgtctttgttttaaccgcttgtgtctacttcatgtctcgtcctcgctctgtttatcttattgatttcgcttgttacaagccctccgatgaacacaaggtacgtcccaacttttccatagaggaaatagtctaaattacttttacccaaaaaaaaaaaaaaaaaaaaaatctaaattaagtatacttaagaaattataattagatttgtcaaaaaataataattataattagatggattagttgtttatagggctgcctaaataaaataaaattttgcctttgcatgtgttacgttagtaattatttttcaggtatatataaaaagtaattattttgcaaaacctttagatattggttacgtttgatttaaaaccgaatggtttcgtagaaatttgagaaagtagataacctaaaaactccgattaaagaaaccggtttgacttatataattttaactggtttctgttttcattttattttataaaaaaaacaatccaaatttacgactataatcaaaggagattgataggaaccggactgataattaaatgaagctgaatcaaaccaaacaaaagttcatttaattccggttctctcgggtttaatctctttttgcattggattggtttaggtgacaaaagaagagttcatagaactagcgagaaaatcagggaagttcgacgaagagacactcggtttcaagaagaggatcttacaagcctcaggcataggcgacgagacatacgtcccaagatccatctcttcatcagaaaacataacaacgatgaaagaaggtcgtgaagaagcctctacagtgatctttggagcactagacgaactcttcgagaagacacgtgtaaaacctaaagacgttggtgtccttgtggttaactgtagcattttcaacccgacaccgtcgttgtccgcaatggtgataaaccattacaagatgagagggaacatacttagttacaaccttggagggatgggatgttcggctggaatcatagctattgatcttgctcgtgacatgcttcagtctaaccctaatagttatgctgttgttgtgagtactgagatggttgggtataattggtacgtgggaagtgacaagtcaatggttatacctaattgtttctttaggatgggttgttctgccgttatgctctctaaccgtcgtcgtgactttcgccatgctaagtaccgtctcgagcacattgtccgaactcataaggctgctgacgaccgtagcttcaggtttcattcattttggtattaattcgttttacaatctcttgacgacctagtaactaattttgtgtggtttttaggagtgtgtaccaggaagaagatgaacaaggattcaaggggttgaagataagtagagacttaatggaagttggaggtgaagctctcaagacaaacatcactaccttaggtcctcttgtcctacctttctccgagcagcttctcttctttgctgctttgctccgccgaacattctcacctgctgccaaaacgtccacaaccacttccttctctacttccgccaccgcaaaaaccaatggaatcaagtcttcctcttccgatctgtccaagccatacatcccggactacaagctcgccttcgagcatttttgcttccacgcggcaagcaaagtagtgcttgaagagcttcaaaagaatctaggcttgagtgaagagaatatggaggcttctaggatgacacttcacaggtttggaaacacttctagcagtggaatctggtatgagttggcttacatggaggccaaggaaagtgttcgtagaggcgatagggtttggcagatcgctttcggttctggttttaagtgtaacagtgtggtgtggaaggcaatgaggaaggtgaagaagccaaccaggaacaatccttgggtggattgcatcaaccgttaccctgtgcctctctaaattatcattcttctaaattaaatcaagtaagatctctaattactccaaccaaaagatacagtttggttggatgataggagttatttactgatcattcgtatctaagtctgttataagaatggatgtggctagagtcctgttcagcttcaacttgttttattttttgtttgttctctattggatcttcataaactttgagagattaaagaaaaaaactcttctttagtttgatagaacagatggtcattgtaatttctttaatatgtcaaagtaaaacaatttctttttaaggcaatctatattcagatacataataaatttagtttacgtgtataagaagatacttgtacgaagtaataaagaaacataactttcggctgatagtgattaaccttgtgtggtatgatgatttttttaatttacttattgtgttgatcttttcaactcctaagaaaatttaatggggttttatagtaatcgtatgcaaatctatgttgaattttatgcgaacaacccataaaatttaatcataagaagtttggatttgaaacttcaaactacattttaaagtttttctttttgtcgatgttcaaatgttaaatatataaatcaaaccaaagtaattatgaaaaatgatatggaaactgaaatttatggacaatgccaacccaactttaaagacaaaaacagagaggtgaagttaaaaacagatcacatcttaggacggtgaaacgttgtccactgaccgaagtaataaggttccatacttcgacgttaggtagatagttaacgaaagtgatccccgcaacaatggccttagaaacattttatatatattatttagaaataagaaaacagttttagtctaatgattaaaattgtatgaattgtattacagagtttcaaaatctaaagttcaattttatatttatatatggttggaaattacaaaatatggaccttcgtagtttatatcgggcttcattagagatatgggaagtcaatttcttgaaagagagatcgaagtttagctccacacaacaatctcacatgagacgctctaataagatttcttacatttagctgttgatctgcaacaatttttttttaggtcaaaacgacttgtcaaatggtgttatttcaggagtgcacatttgtaatacgttgaaaaaactgtaactcaatttcattcgtatctcctatatattccacacatccatttaagctttgatcatcgctataaattataaatttttacaacacccatttaaactttgatcgtcgatgtaaattataaattttttcacttctataaaagataatgataattagtatttgaaacgctataattgtttataaaagtagaagatatatatatatatatatatatatatatatatatatatatatttagaaaaataagttaattatttgaaaggacaaaagtaaatcacaaattcaaaaagagattcaattaccttcgaatgcatagcggagataatcgaacgaattcctcataatatattgaagaaaatatcatcaacatgtcgtcaattttataacatgattttgttacttgttataacatgagattgtcagaatcagaagtgttcctgaacttgtaaatgccacaaagccaataacaatttacaactgattttagttatttagtgttgttacttgaatatttttcattttgttatttagtcgaattattcttcatctaactaaacaaatttaactcgaaattaaaccaaaatgtcaacccctaattgtgattaagatggaaaattagcaaatttagtgagactaatttttttattttttttgataaaatagtgagactaataatgatattattttatatatatctttaatgatgtagattagttttgtctatgattacatttttctaatgatattctaatgtaatttcttacgcttgtcaatgttaccgtttatgatgtactttccaaataatagtatagaataaaatcacattagcaaatgatgaatttcgaataagtgactgagaaaaaaagaaattgagagataaaaaaaacatgaatcagtgaaaaacaagctacattacacgcaaacaattttttcttagggcatggattttactcccttgttaattggtggatttactccatcaacacgcattttgttaatgaaattaacccttttcccatcatatccacgcaaatcgtcaaacttatgggcctactttctgttttcaaatagaacagattcaaaatctgtcaataagtccggcccagtaacagacccaaaaagggtcatcgttcgtcaagtcatgacgccgttcttgacttgcttcatttgaccagacttgcttcgtctccaatttttcccctgaagaaagcaaagagcatcatcggcgctgaagaagaagaagaagaaaatggactcatctttgtcgcagaagttcactcttgcttatgcttctctcctcggaggtattgaatctgatcgcttccttctttgagttttcaaatgatttcgttgacttgatctagttattatacaattaggtattgagatagtgcaagagaggaaccattagatagtttgacttcacgagatattcacatctctaatatcattgtcactgtcttgagtactatttatccaggctttgtaatgtgtggttactagtctgattgtagtttagcatgtgttgttttgtcaataagtgtattagttgttaaattcatgatagaaaactagttctattgtcttgttctgtccataaatgcgagtgttagatttggatcgtggtgaatagcaatattatatctagtgatgagataatcattggagtttctactgtgatttcttgatcataatgtttcgataatggtgtgtatctaacatgtaacatgtaatgcgttgactcatggcaattattgtggcagttggtgggttgatgggttacctgaaacgcggaagcaaaatatcacttgtcgcaggaggaggttcagctgcgttgttctattatgtatacacggagctcccaggaaatccagtcttagcatcctccattggcattggtaagaaatcatacttcttgttcattgatcttggcaaatcttaaaccagcttatgatgagtccaaagttcaagtatgttaaacaatatgcagtggggtcggcggcactgacagggatgatgggatcacgttacctaaggacgaggaaagtggtaccggctggacttgtgtcggtggtgtcactcgtcatgactggagcttacttgcacggcctcattcgctcaagttgaagtgtctctgctatcttccttggacctattttccaatattgttaaggttttttgggtgcgcatttcaaatttctgaaaattgttgtataaatgctttgtggtgttgtttcttttaccaagttcttatgtccttgtgtacttttaagagattatatgatgcttcgagttcttcatttagaaaacttaaaatcacttcttcatatggttcaagagagttctattggtaagagtgttcaagagagttctatattttctcataaatttgtcatggcacgtattagagcatatatgatggctaaatgagaggtaaaaatgtaacatgactgcgaatcagtgataatatatgtaagctacatttttatgtgaaactgtttgcagttacagtattattcttgcaacaaaagccaaaagttgaccttacacacttcatttaaattgttatttcataaacgaggcaaacgccaaaagttgcagaacctgtgaaattgtgtttgatatttccatgtatgatgtattgtcttaaaacctcatagtttcgaggttatacggcttagagttgcttctatagatccatgaggttcatcggttggcaggtacacatcatctttaaactgcaaatgcaagtcattggaaacgattcataccctgaaattattagcttttatgcggcttttttgttgtctgattttaagtttataactatgtattactgctgctacttatctacttatcattttcgtttacgttttgtggtttcatcataaagacaacatcacatagaggttcttaccttcaccattgaagggttttccttcgttgaaagatttactggtagaaaatgaatatttggcatttttaggtgaatcgatgatacatcagcgaacctgatcatgttaataagaacctttatcatggcaagaatcacatcatcacacaaacagcgaaataaatatagactgatatgtgataccttttcagtacggcgcttcccatgaggtagagagtgcgttggacagaagggctatacacaccagtttctggtggaccaaagaaagtatccatcagaactttcttaacgtccatgaacttctcgctaaagtagagtccttttgttggaatgcttgcaactgactcatacgagtacctgtcatcatgaacgtgtatgtcggtttcaagaatcaatcacaaataagaaatgtaacatcactaattaacacatacctccaagatgcattaacctctgtggccagcattcgctcacgagtttcaggcagaatggtgtatttgtctctgacaaacctctcaaatcctgactgttcatttgcataagagcggcttttgtgaacaatcaattatcagatcttgtcttttgacatccattattgtcaatatcctaggattaagatacaaactagatagacaataataacatcaaatctagatcttcactcattgttcatatcattcttctttgaaattcctctccataaagttcctaagttagagtagacttctatctctaaaactacagattgccaggtataatatttgtctccgagatctagtggtttacaaaatatggaaacactactggagcttctttattgacgagaaaaaactggaaaacgcttgtccaaagaccgtggaacacatctaactcgccattatccaaaatataacagtgataacactgacaattcaacacctttctaacaaaaaaacatatatctacagaaagatgtttatatacctgggttgtcttcagtagagctagtcctccaataccggaagttaagtttaatgcaccagacttttctactcttgcctctgtagtatggttctctgacccaagcttaaaaccttcaaaacaaaagattgatttagaaaaaccattaaactatagcaaatattcgttccagaaaaaagtgtcagaaccaaccatgtaaatgtggttttccatcgatggagacacgctcccagggcttctcaatgatattcacgatagcagtaaatacctggttaaacagagaggaaacaaaacagcaaaatgaataaaacatctttaaggtgaatatatccaattgcttactaaaaaagatatggtgatagtgcatagtgcatacatacctgtggataaaatgagcaaaagtgtttcccaataagtatggcaaattcctccaccgagagccgatctccacattccttggctttcacataaaccttcattccaacataaaacatttgtcagacactaggatataaccatgaataagaacagaaacatttgttcactagaatgactctaagaccaacaaatattttggttgacttacagtgtttttaatggtatctgtggcgacaatatcagagttatcatcaagacggtaagaagagagacagtgagagagaagactgatgctaacattccattcaacaaagtgatgagatccatcatgagcatgacgccaaactcttccaactctcactcgagccttcccatgtctttggtccaatctgatcccatcggcttcttgtgccattctaagtaaccttatcaaaccaaattgatacatagaaacatagagacacgttaatatctgattcaactcacggatctacagaatcaagtttaattttgacaaatcatcttcgagttctttaacacaatatcatcatccaatttagcccaggaattgctagcagagagaaagacaaaaagaaaaacagggatcacctgagagatcgatcaaatggtttcagcagacgatggagatggaaaacgcaaggggatgaagaagaagaagaagaagatcgatttcgccttgtatcaaacgaagatacctcagagcaaagaaacaaacgtatacttcctttccaaaaatctcaatggccattttcggtaaaataccctgccaaaagttaaattacgtaaacgtatacttaggacttgttattggtttattgatttgtaaatctacgtagaatttgaaaattttaagatatatggattttgaaataacatgtgtttacccatagatttgaatccttctatttttctcttttaaatccattcaattccatttaaaacataacatgaattctcaaatccaaaaataaatgactaaacgaataacaaaagattttaactagtatttataaatcatcgaatcaataacacataattttaattagaattttaaaatcagtaattgaataacaaataatttttgtttggattttcaattccttataaatgtacaaaccaataacccttccttaatttctttgtacacatctctaatctttttttgtttttttcttcggtaacaatacattaattaaaaaagtcatatcattattagtatctcaatcggcgaggaaaaagtttacaaaagaaaattaaaaaaaaggaatgttgcattattaggcacttttaagaaatgtttttatgtttgaggcactttctattgttcagacactttttcttgtttctggagaaaataaagacaattctatccttcccaaattgaatcattaattgctaaaccggttcgattggttttgtttgatgtggtatctacttaaacacggggtcaataagattaaaacaagttaacaaacggttgagatctctaaaaacaatctcagcccacctcttcaattcgcaattttcgtttctttccaattctccaccttctcgatttctttttcttcttcttcctcaattcggatccttatgaaaactaaaagaaagttatctctatctctccatgatttgtagcgtctccgtctcttcatctctccatagtttctgggcttggttccttttctcgggttctttattttgtctaaaagaacttcgatttgattccaaaagtgattggagggcttgggtgtttaaggaatctcagttttcagtaacgagatcaatgtgtttccgccggagtagggggattttgtagtcgcagatcaagcttttttcttctatctatggaaagaaagaaacatcagaatccacgaaaacatctcaacttctcctgcccctgtcttttcacagatcgataggagcatacgtgaaactcttctagctcgtcgttgccgcaatggctgcggacgtctaccctcgcaatggttttcccatggctaattactcataagtatttcctttctacttagtttgttgtagtagctttgacttttaaattttttttttggtcagagcagctccttgcccccgagctttataattaacattgttccattttggtgatagaaattcatattttatttataaaaagaaatagtagacgtatacaataactttattgtaaaatggatatagcttaggaaaaaggttttcgtatggactaatttaaatggattcgtttttatagacactaaaaatttatttgttaatttttctttcatctccaccttcaaaatattgatttcgaaaaaatggatatggctcagtaaagaggtttccgtatgaactaatttaaatggactcgttattatggacactaaaaaattattttttgatttttttctcatctctttcttcaagatactgattcccaaaaaatggatatggctcagtaaaaaagttttagtatggactcgttattatagacactgaaaattatttgttgatttttctttcatctccatcttcaagatattgattcgaaaaaatggatatggctcagtaaacatttttccgtatggactcatttaaatgcactcattattatggacattgaaaaattatttattgattttctttcatctccactttcaagatattgattcaaaaaaagtagatatggctcagtaaaaacgtttccatatagactcatttaaatggactcgttattatggacactaaaaaattatttgttgatttttctttcatctccaccttcaagatattgattccaaaaaaatggatatgactcagtaaaaaagtttccatatggactcatttaaatggactcgttattatgaacaataaaaaattatttgttaatttttctttcatctccacctttaagatgatgatgccgcgagaatatggctatatatggacatgactcatggtatctatatcttagattggcattgccttgtgagtatattaaaattcttttgtctacattgttatattcatatttacaattatcgataatgtcaacaaatattgaacaaagtcattaagagagaaaagtcttaatttgctggtatgcgtggaagtagagtgcagcgataagagactttgtatatatctgttgaacattcacaccctgcaaaactgagattggttgttaggaactgcaaacatttgagaaggatataaaaaatagaatcgtaatatataataaactcacggttgattgaatgtatgaaggagtgaacttgatgccttccgtaaagaaagtcacatgagccatcagaacgagagatcaatgttataattgagaagagagtgatggtgtccaagatgtcaaaaaaaaaacacaaatcagaaaaagagctcacctcctcaagaaacatagcagatagtaaaacagagaaaaaaggctctatggctttaatggtatgagtaaaggaaacataaactttctcgaggctcatgttcgtaaatagattaccaagtgtgtgcacaacatcaagcggcaagatggcagctagatatcaaggaaaacatatcagagtgagtgacacatctctagaacaaactgaacccacatgacagtaatgggcacactaccaacagcaaactgaaccaaagtcacaatcattggagcatggttagagctttcaaaacctgcaagattacgaagaaaccagaaattactattggttctctcagaagtaagaataaaacaataaagtcaccaaaatagcaaatcagcgaaacacgtctctcttctatataagatataatcaaatttttgaattcttcatcctaatcaaaacatgattgaacacaaagatgtatctaaacctttacattttttgatgaatcaaaagttagacttctaacaagaagatgaggaacagaggaaactcaagtcgtgtaagggtttcgtttaaggtttttttttactggatttgtttgctggagacgatgaacattgatcgagcaaatgtaaattaggttttttttactggatttgtgaaatgaaactgtaaagtcgtgggagagattcaggaaaattggtgaaagggaaccatatttggtttagaaaaaacgggtttggtttgattcacaaatgaaaaatcagttttagggtataatagtaaatttggcaatgcaaagtgcctgatctttttgaagtgttgtaacacgtaaaatattttttaaaagtgtctgagaaggcaaatatctctaaaaaaaatacagatatagaataacgagttaataagacaatactagagagagaaaaaaagaaaaaaaaaagtcacacaatactagagagagaaaaataagaaaaaaaaaagtcatataataagacaatatcatctaaagagattgaagaaatcggaccactcctcaagcgacttcgaatgtacatctcgtttactcaattaaatctgtaatatctattatcttcaatctctatagtataattaattaaggcgttacatatataatatataaataaaatttgtaatttgtatgtatttagttatactatgtaactttacaacatcagtgtaattaagcttctaaacaattgttttctacttttactatataatatcagtgttaatagatcctatggagaatatggaaaagccggaatctgctagtttaccaacgtcgcagtagtatgtggtggaaggatgcacaacaagatatcacagattcgtatgaatgttcatcatatcaggccaacacaaacaatcttcatgaaagagaagccacacttgaatcccaacaatggcgaaaaccgcaccaaggatttctgaaatgtaactacgattgtagtctttttcggaccggggaaaatggaaaagctggatggatcataagagatgaccgaagattttttattgaagcgacacaaagtagaggcaaaccctgtaatagtgtcattgaggcggaactacatgctctccttatggtcatgcaacacacctggatacgaggctacagaaatattacctttaaaggagataacaagcaaattccacatcttatcaacggagaaatacagaattttggagtccataacctgacgaaggaagtccaaacaaggcaaaaaagattcacaaatgctacattcacatggataccaaggcattgcaacaaggcggctgattgtttggcaaagaagttaattcctgccaatgttaattttatacaacatttctttgttcctagaagccttgtacaaatcctccatgaggatcacttttcaaactaataaaagttcttttgatgttaaaaaagaaaaaaacaatgttaatggactaatggtcatatataaagtgagaaatcaaagtaaatccacaaacttgcagtttcttatctcttaacaaaatccatatagttctctagctaaacactaacaataatagtagaataaaaagtaaggaacaagttcacagagtacttcctgaattggataaaattgacaacatcacatgtgagatccaattttggtctttacacatcaaaatatacatcaacttgttcatgcaccttcttgagaagcatagctttttcattattttctaagataaattagctaagcttcttcgagctggtgcttgaacgagtcgatggaatcaactagtgaattctatacaaaaagtaattatagaaagaacaagcaaattaaagaaacaaacatggtcagaaaataaaacgtataatcttgaaaactagaactgcacaaagtctacaagcagatgaaacttcatttgtttttattgagtgatgatgctaaaactagctactagaagggaagatttcaagagatagatagatagggtttgacactgattttctaacaccattgacctgtgacgtgtcacatgtccctcaatttgggctttcagagaattcgaggcccaatatgagccacccacacatatcttccattgtcaaaatgtggcaacctataacgaagagtcgaagactgttttcattatactcgacggactatatagttttctcgccgaagacaactttgaaaacaaagtttgtaagataaatgaattcgtatgataacaatgctggtatttgtttctgcattgtcacattttgatgacataaaaacaaaagggagtttttatgtcatagcggaagaagacatggttcaaagatcacataacatggaaaattgcacacagaatgcaactaaagttacaagcaaattcatgatcccttgattttttccattacaaatctttcccttatctgaaaaagatttgaggaatgatttgtagctctgtctgaggcatgctgttaagtggacttcatcttttcccgcatcttgtattgcagtgttgccggggcacaatctagcggtgtttctcctggtgacgcataacagtttatatactttaggcgaacgaaaccagagaagttcctatgtaactaactacacttgttctccttaacatgtttttcgcaggtcattgatttggtaagatttgcgtagcatgagaattaccttgtgcattcttgtactcaaggcttgctccatgatccatcaacatcaacgcaatatcagtttggttgaacaggacagcctgtggaagtataagattatgttattagtatatttccgaattacttaagcaaatcaatcacacatgaggagtgggaagattaccagatgaagcaccgacattccttgcctgtctcggtaatttgcatctacgccctgcaactcctagagttttaacctctctctatacacttaattaagcgcagcttcttaattaggagattaagtacctcttttagaagctttttcgcaccagcactgtcaccattcttaatcgcttctcttaatcccttttaacaaacaaattccataaaatcaataatgctctgttagaaacagtaaactatggtttatttatgtaatgaaatgtcaagagttacctccccactggcttcatagtctctttggggggtgtctagtccagcatttagagctgatctgagtttttcaacagcttatttacaaatcaaaacagcttaaaagatatataacggcaacgagagatatttcaatatcatttgtcagttgccacaacaacgaatatgggaagcaaattttctacacaattgcacgaaaaggagaaagtacgagtgatttgatcggtccagctgaaatgcaagagcaagcaaatttcatgttgatacttccttgccctaataaagtaaatgaaaatgcctagacaaacaactttctcacatgtgtaaagcttatgaagtaaactctagacacaaacttttgccttgatactacgactaaatgataacatacctagcattgctgctggaagtggaacctttactttttgctgaagcctctgacttcaactgaggaagaaccacaggagcaatggtagcctgttccaaaagcaatattcaaaagcgagaaacgtattttgtcaggaacacaaacttgaggaaatgaagtttttacaggtgggtttggtttatcagttgatttgggaggagctacacagatacacagaggcataccacacttgcattccattgtttcactacctccaagtcccatatcgttgtcgtcaatatccaatctcgaaacttgttctgttagagaattaactttattggaaaacagcatgcaaaagaatgacttctttgcctatgtgaataaccttgctgccacaagtagacatagacagattcatcaaatagcttctaatgtttatttgaatcaacctaacaaataacaatgattaatctaccatttctcattatatatctgaaatgatctgagtataattgatcattttgtagcttactatacatgggtttctccaaaatttctaaaaaatgtgtactatcaatcagtctaattcagattttttccaaaatgaacaaaaattggatttttctttctctgcaaatttcaattactccggaaactggacaaaaccttagatctacaagcacaaacacaaaaattcatgtggaaaagctataaagaagaagaaggaataatgaaagtggaatattattcaattcacctgtcagagatgatgacgacgactgagacgaaacaaaaagcttgaagagaggagaagaaacagagagatgcttttggagtttatttatttaggaataaaaagatgatccaactgattgagaactattttgatcgtcgtttattaattaaaaattcagataaatatttaaggacacgaaaaaagaaataaaataagaatctatttatattttgagaatacaaaaaaaaaaaaaaaaaaaattcactaactaaacttctcttaccataaaaaacctatactattcttcatatttttatcatttcagttttcataacatgttattttttggtcaatgtgtaaaaaatataaaaataaaattaataatgtttttagtaatttttttatgtcatggagttatgtagtaattttgaagaagcaaaggttttttgtggaagtgaatctatcacaagaactctccaaaacattatgattcaagctaaacccacaagaggagatgtaaatgtataattcacctatccatggcggtgctcatgtagaaggaaatgtgaacatttggacaacttttgtgtggcaaagaatgagggaaagtggtgatggaattagatgagggggagactgactaaactaacatgccaacaaaatccaagtcataaaagggaaagtgtttctgcaggaccgagttaacatgtggattcaactctcataaagccattaaaaatgtcaaaatcgtgagggaaatggatgataaggaaggctggtaacaacaagtcatcatcatgtaatagttttatacccaaaaaatccattgctaatatagaagaatacatgtaggacattcattgatttgagattcaatgaggattttttaatataaaagaactctccagttaatcaacatttgctcctctaccacatagttactccatctgaaaatagagaatatgcaacgcagaactcgggatttctgcgaccaaatccttttcggaaaaccaactgtcaatgatgttcccaataggagattcctttgaatttgcagcccatctgtctgcaagcttaaacccaaacttagatgcagctgacagaagagaaggttcatcaacccttctgaaaacatggcatagaatcaacgccggcttctcttgcacctctaagtcgtctcccattttccgtaagatcaactcttttgcggtttcaaataaaggtataatggcttcagctacataggtaacatctgtccccatgataacttcgaatccctcacaagccaaacgcttaatgctttctatatgctctttgtttccccattcaagtacgcttgttttcagttttccaagtaaagaagattggaggttcattgtgatgttctctgtcaatagcgtaagtgcctttgtgtctgcatcggttgctaccacaaggttagctgatctggcagctaccatcgagcaaattcctgtgcagccacaacccaattccaacacccgttttccagaaacaatgtttgggttcctgtcaagaacagaagccataagccgagcagactcccagagcatcaaccccgtagatttgcaagtatgttgatattcttttgacaaaagtttgattttaaaagcagaatccctaagcttaaccacgctcatctatgacaacaaatcgaatagaaaaacagatatggacttgtaagcatagaattaaattaaaaatactcttcgagaaaatatgtaaaaacaatgagattaccgaagtctcttacctcatgacttgatggggaggctccaaacatttccatagccagaccatcagatatgtcaatgtcagtgtaatcaataatctcttttctttcctgctcctcagatttagactgaatgctatcctgttgttcagatttatctaatttggcaggagtcaaactatcacaagggtttttgttgccatttgttcgacgaaatgtagcttggacccagcgccgattcatgaccagttcgcgtgaacgattctcaacttgtttgcagcaaacatcaagctcctcaacttcaaatccttgttcagaaaacaaagtttctaggaattcattagaaaagtagaatgcacgctgcatagaaaacaaaatcatcacagatctgcaaaattatagaaatgtgtactgcaaataaatagcgcaggagaaagaaagaacttacagtgccatcacctctcacataaaagttctcgctgatcctctgatccttcccagagaacctctcctgttgatgaaatactgaaacacataaggggtaaccacgccttcgtattctaaaggatactaaatctcttaagaagtggttgttcttcctaaaaggaaagccagaccacaatgtttttttttaagcatgaaactgtagtagaaatattttttcgtttcaagtgcatcaaaatgggcatacgagtagcgataactttgaatttctgaagtaataaaaggtggatcaaacctgagcaagatcaccgacagcatagtcacggaagaggatacacccatttggctgaaaacagaataataagaagtaactcaacaagaggaattcagtctaacagaggaagatggatgtccagaagtacatgagaaaggatgtgtttgataccttaagaactttcctaatgttctgcaatactgaggacatcttctctggggataccgcagataaaacaaatatctgttcaacaagtatttaaaatgagaaatagcccatgacgagaaaagaaaaggctcaaacgttatatactcaaagaaagaaaaaccaagggagcaattacaggggagtgttaatcttttactaagataatttgatggatcattatcttctacctagttaacacaataatataaatttgttaggaaaataccatggtcacaatatcaactgaagatggagaaatatgcttgtcaagaccatcccctgtcaagtcacaagcaaatgcacaaacgcgtgtctctgtgtattcatcatgagcctgaatgtcataataagttaaatacactctggtcaacaaaaaactatgaagcacatgacaaatcacacactattccatttggtagacgcagcaagtaactactcacaggcataaattaaggtggacctgttaaatgagcttagagacagaaagactattactataaattaacctcactaggaaagacaaatcaaccaaatcaaagtacacattagactagaagaagaaagtgactgaccttgaccaattcgacggctcgtggtgaaaaatcacatgcataaacaaaaatgtctggatatgtggcgatcaatggaaagatggtgtttccagctccacagccaacctgcaaatcaagaccaattgctcaacagaataacaaaatagctagattttggatgagtaacagcttgagcatttttgtttacctcaagaatgacacttttcccactaacctgaaaaagggaataagaaaaactaaggttatatactatactaggtaatgcagcagaaaccaaaagaaactagtttaaatactcacggaaaaatagctattccattccttatccaagtagtggcggtctttgaaaaactgatgaagaacaagaaaatcttatcatatagtaaaacacagcaatataattagcacagtgagctcacactcaaatttcagaaagcattaatgtcaacgttatgatatgacctaatactggaaccttagattatattgctgataaaatctggaaccaagggcataggcagttgaagacaatatccgctcaagacagccataattccgtttctcctataaacaaacacctaagttactaaacttaatgaaatagatctacttgatatatagtatcactaactaacttgagtcctcaaacccatcaatcaccctaaccagttcagaggagtggttgctttaaatactcttcactttcatacttgtaccacatatcaacaaagagagggtcttaacatatatctgaacaatccttaacgactacatctaaagaaactaaacgcatttaccaaatcaaaagtgaatccacccaatattacacacttatatgcatcaatattagctcaattacatgtgaattgagaaagaaagtaactgagctaaaggcttactctgtctccatgatgcttgtaaaatatatcccaatactttttagcatctcgctcatacttgtctgagagataaaggaacaagcttgcaaaaattcatacttggcaatatagatatcaaaatcagcttaaagatgtaaactttgagaacctcgccaaaagggagaaacaccagcattagccgtcggataaatctgcagcttctcaatcggtttttgcggttcttctatgattttcaagccagaagacattatttattaccacacgccgtatcttcataagaacaaaaaaaaaaatcatgaatttgagtaaattagagaagacccaagtaactcaaaaagtagaaaaaggaagactaacctgtgttcgtcgacgttaaacgctctggttcttcttccctgagaaaaaatctgaagaagatttttagagttttgtttaagacattaagctgcagggttttaagttggtcggcccagtcgtggttgggccaatgtggacttatagtctgaatgaataaaacaaatttttaaccttaatatatgctttgaatatacaaaacatctcctgatgttgtaaccgcaatgtgtttgtaccatgttgctgttacatatatggtaccacttaaaggagttaatttggcggacgaaatttttgtaataaactatcattgaagtacacttccttgaaaccttttttagacaaatccaggtttggcaattcattagacgttaagacataaagactctcacctcggaggatatggtagcctttcaaggatatggtagttttggtattcctaaatccaaagtgcaatatgtcaaaacggagcctatcatctcttcactcataattaacaataataatggctaatttaggggatataaactattttggccagaagaatagattgatttgatggaaacagattgtacagagttgataacggtgacaatactgcgtggataatcgtttaatagcaattagacaacagtcaacacacccaaaccacatcaattacattgcacacgacaaatgacagatatatcagaccaaaccgtatttaattatatccaaaatcttatataaaattgtgattatcacaaagaaccaagatttgtacggtgtcgacacaaaacaaagaagagaaacaaaaactatttcaaacatgtcccgactaatcttcgttcgctcatatgcaattatgcacgtgtctacacatgcgaataatttgttcaaatatttccttttgtcatctacacctaccacatgtaatttaagacctcactagctgtgattttgatatttaagaatataccacatacagttttaaactaaatatttgatatgaatgaactactaatgcaaagttgcaaactaccgctaacaatcaaactcctattaagttatgttttcaaaacaggttcattgctttaatgaacgtcactaattcaaacctaagtaaaaaacttaacttttgtgtgagtatctacttgcagcaaataattactttttgttttgacaatatgttcttttggagtttttctcaatattttgcaaagagttggagtctaactctctgcttaaaaatcctacggagatgattacacctcttgcactatttatacatatccttcaaagttttttgaagtctaaattctctttacacgacatagacaaactttcttactttggatggtgaaaaaatctggttaacataccaaaagagtggtgcaatagtggttactattattaacgtcatttcacgatattgtaactagctagttcaacagttaaaggtaaatttatatcattttttttggggacaaagtaaatatatagtatcattgtttcaataatttctgcattaatatatatatccacagcattaatatatttttcataatgtcatggtagataagatttgctcgaaaaacgaccctactgaattaacaattttttttgtttatttgtcaacaatattttttttttcctgaattaataagtttctgtgaagctaccttcttcttactgagcgtctcctgtgggttcccatatacactgttttctatcacacactttgttgtttacttgtatgtattggaatggttcataaactccataaaccaaaagaatcgggtccaattttttttccaatatctaaataaattttactctataaccaaaataaccaaaattgaactaaaggaatttcgatatcattacacattacattttaaattctataaccaaaaaaaaaacgaaaaatatataaaagactaataaattgtccctacttttctaaatgaataagtttcggtgaagctacctttattacccagcgtctcctatgggttcccttattacactgttctgttctctatcacacacacactttgttacttgtctctatatatcattttaaaattaatatctttttttttcagacacaccatctttgaatcttcttcactcaaagctttgtcatattcaacgaagactttctttaaacaaaacttttaccgcatttaatactcgtcaactacacacacacacactatacatttattcagcttgtgttgtgtatatatattgtgttattcctcaacttggttgttgtattcaatttctcattcctccttaagttttctctacacaagaagatagagataaagacttgacctttttcaagtcttccttggtgttaatactctgcaaattcttgaggtatgtctctgattcttacatgggtcgattataaaagatgaataaaatcataaagtctccacctttatggagttattctgaatgtgtttgttgaaatgtctgaatgagattagatttttatccatcgtcggctataataaatgtgtttggtggtgatgataggaatgactcagtaaacaaattaatatattaatgatagttggcttagagaaaaaagattcgtttgtcaaagtttttgatattgatctgaatttgatacgtgtgcagggtagtttggaggaagagatcgtgtttaatattgttgtttaatcagagaaagatgggtctttctctttctttgctcttgtctgcttggaaagaagttgtgacgacccagttcttcagtttcaagaaccctgtcgagagttttcttgaaaccagatctttcagcttaaaacttaaagaaggaggcttgacttcaagaaccaacagtttcaagagtgagaacccgcaggaaaagtctccgaagacgggtatggagcggtctttgagcttcaacagctgggagattgtgacagaagttgagactgaaccgatgaacaaggaagatgaggagattgttgaaccgacgaagcctgctcgtaacagtttgaatggaaggaactgtgagagaatccaaataacgaagcctactattactccacctacgccttttgtgttcttctctccaagaccggtcaccgagcttgatgcagctgcaactacgttacagaaggtgtacaagagttacagaacaagaaggaacttagcggattgcgcggttgttgttgaggagctctggtgagtcacttgatggtcctctatcttttttattagtaatgtggttcaagctgttgaaactaattcaaatgtttcataggtggaagactctggatgctgcagctttaaatttgagctcagtcgccttctttgaagaagagaaacatgaaaccgcggtttcgaagtgggcacgagctaggacacgagctgctaaggtttgacatcatttccacaatttattatctatgtttagatgtcataagaaactgatgtgaatccttctattgtatgtcatttaggttggaaaaggattgtcaaaagatgaaaaagctcaaaagttagctcttcagcattggcttgaagctgtaagtccccatacttgctttggacatgaaataaaccttcctattttgtggatttgatctaagttttgtcttttcggcatttacagattgacccacgccatcgttatggccacaacttgcacttctattatgatgtctggtcagcaagcatgagcgcacaaccattcttctactggtgagtcccgtaactatcgttatctttttctgttgtatgaatctgttctgaactttgtttccacctatttgaaactgaaggttggacattggcgatggaaaagatgtgaatcttgaacaccacccaagaagtgttctgcaaaaacagtgcattaaatatctaggaccagtaagtcttttttcggtttcacctgctaaaaaattagttcagggtacttatcttctttttgctcatacacgtttgtgttattcaacctgcagctggagagagaagcatacgaagtgatagtagaagatggaaagctaatgaataaacaaagcatgactctgatcaattcaacagaggattccaagtcaatttttgtacttagcacaactagaaccttatacgtagggcagaagaagaaaggtcgtttccaacattcgagtttcttgtctggaggtgccacaactgctgcaggaagattggttgctcgcgaggggatcctcgaggtgtgttccgattcagttttgctttctagtttggttctcttagcttttatgtcgaggatctaatcaaaacacatattttctcaggctatatggccatacagtggacactacctcccaacagaagacaacttcaatgaattcataagtttcctggaagagaacaatgttgatatgaccaatgttaaggtaaggaatataatttttggttgcatacatgcgaaatatgaaaaatggtatgtactcacttatttaatctgaatacagagatgctctgtgaatgaggaatattcgtcattcaattccagtggctacgaagaagaagcaacaaaagaagaagaagcagagaagaaaccagcagaaaccatcgttacagaggaacaagaagaagagaaagagagagaaagaccggtgttccagcttgcaaagaggctgtcttgcaaatggaacagtggagttggtccaagaattgggtgtgttagagattatccaatggaacttcagtcacaagcgttcgaacaagtcagtttgtctcctcggatttcgcctggttctacacgttttccgtcaccatacggcccaattccttctccaaggcctagtcctagagtaagagtctctccacgcttagcatacatgggaatcccaagccctagagttcaagtaaactgttaggccttgtcaacttaactcaccaagaagtgaatgttatgaccctttaagctagtgaggtatgagaaaaggcttcatcaatctcttctcatcatcctttgttctttaattcatgtttttttttctaagtcccttttggtctttttgttcctctttttttggctgcatcgtaacttctggtttaggtgaaatgcccaaggctgtaaatttattaggtgaactgtaaacaacaactttttgaattaaataaaattttgttaaaaatattgaatgattttctatctgaaaagttcatcattttatcttgcctaaaatgttagaaaacgaaaacaaaaccaaacaaaaaaaagtgcaacagacttttggaagaaaaaaaacagtcttgcaagagttccaacaacaaaattctcctattatcgtataataaagaaaaacgtaatctattcaattcaataatgtatccatcaaaaacttgacttgagacttttcatgggctagctgttttggtcttcttaaaccaccttggcttgaattgatttgtttatggtcttttttcttttcttcgctaatccgtacttcttctatattcgtccaatcccttgggccttggcacacgtcttatttcattattattttttttatttttttattatttattattttatgtcactcgagtatgattcttaatttgaattaatatacaatgagccgaaaaacatctaaaactatcaaaatgattcatttgtactaaactactaataggcagtactgctaataggtaacgaaaatacgaagactttttcttaccgccatgcaaaaagttgacaatgaaggcgaagttgcaaaacctcaattgaagaaagttgattatatcagaaaagtcaacaacggacaaataatattggatatgaagaaatccaacctagtccaacagtagagaaaccataagtttagtcaaattccaaagaaagctccaacaactaaagaagttaaaaaaggattttgactatctcttctctctaccttcaaagatatgtgaaaaacgacccaaagccaaagttacactcctatgtctaaagaattcgtttgccgaaagtgatccgcttaatatgatctaaaattatttacaatagagagtgttgaattgatttaataggatattgcaaatgatgatgaaaatgaggtggattaaattgtgttaaaaaacaatagttggttttgatttgctttttttttttggtatcaggaattcaatctctggatttcatcgtcaatgtattatgatcctcaattgaaaaatggcaaaagattttatttaatacaatatttttgtgttctctcttctaattcatttcatgggtttcatgtagagtctgtttccaatttatttatttgtgtgttgtaatactctatgattttgatttatttttagtttgtaacatattgtttctatctcatttcctctttaagagctatgccaccaccattctggttgatttgtgagttagcacattaatcgctaatgtacatcatatcagaaacaactcttgactcgattttttttactttcattgtatgtttaatgtagttttttcttcaacattgggccacaattggccggcccattagccagacaaacaactcttggatcgaatttttttcctttcattgtgtatttcatgtagttttttttcaacattgggccacaattgtccggcccattagccaaatccctacatttgtatcgagcgggactcaatcccaagtgtgatggtgcatgttttcggtggtacatgttttcatgtaatttttgttttattattttaagaagttatcatcaattagaattaattgtatatatctcattttcattgtatagctaaggacccaatctttacagagttcatcttttttctctgtctgattaatcttttttttttattatgtctaattaatcttaaagttgctagacaaatagattcatgtacaagattcactcaaactaaatatgagcgagaaaaaatagtatatatattgaaaactaaatttgggagatacatgggcatttttttcgattctttaactcgtgaatttaggttgttcttttgtcgtttcagttgttgtttttttgtatcaatcactcgtgaatttagtttttttatgagagcataatttattataatttgcaatagagttgtaaagtttaaattgctataacgctgttttgtggagagttaaatagggtgttgactgttgagtcataagaccaatgtgtatggtcttagaaagaaaaccttgtcataattatataagataataagttctgttatagaggttattagacaagtgataggtctaaccagtccaaatcacaaaatccaaaagctaaacattgcttttcgaaagagaatgtatttcgtaaatctgatttgcaacattttgggaagtttaaatttcgaatccaatgatataagaataataaaacaaaacaaggtattacatgaacatgagtgagtcactgtaaaaagtaaaaaacaacaaaaagcctaacatacatatatatatatatttattaatttattgtaccttttcatggtttcttttttcatgcctgtaactctgagaaggacacagacacatttgtttgtgtaagtaataaataagtgtgaaaacacaatcagagacaaaagcctaaagactcgagcaaactttttattaatattttgtttgttgctttgctttgatttgttcaaatttcaaaaacttctctttaacccaccactccctccattaccaccacaacttcacattctccgatattctctctctctctatcaatctctcactctcaaactttctacatacctgaagaaaaaaataatctacgaattcgagccaaaaagatcgaaactttttaatctatgggtgcttcagggaaatgggtcaagtccattatcggtctcaagaagctagagaaggatgaaatcgtaagttcattatcttttttttttgttctctcgttcaaaggttaaagctttatcgagagatactctgttttcaggaaaagggtaatgggaaaaacaagaaatggaagctatggaggactacttcagtagattcatggaagggttttcgaggaaaacatcggtctgattcagacggtgttgattcttctactgtttactctgctgctgttgctactgttcttagagctcctcctaaagatttcaaagctgttagagaagaatgggctgctattagaatccaaaccgcttttcgtggattcttggtgagtttgctaattggttttgattagaattgagaggaatagaacttagtttaatttgaggatttgttgttaattaggcgagaagagcgttgagggcattgaaagggatagtgaggttacaagctttagtgagaggaagacaagttaggaaacaagcagctgttacattgagatgcatgcaagctttggtgagagtacaagctcgtgttagagctcgtcgtgtgaggatgactgttgaaggacaagctgttcaaaagcttttagatgaacatagaaccaaatctgatctcttgaaagaagtcgaggttcttgtctttacctttttagctcattggtttgatgattgtttattgttttgagatttgttatgttctcaggaagggtggtgtgataggaaaggtactgtggatgatattaagtcaaagttgcagcagagacaagaaggtgcttttaagagggaacgtgctttggcttatgctcttgctcaaaaggtaactaacttgtccacattcaacatcttgtttaagttcgtgtctgaagctgaatcgggaatcttgttttgtgtagcaatggaggtcaactactagctcaaaccttaagacgaatagttcgatttcgtatcttaaaagtcaagagtttgataagaatagttggggatggagttggttggagcgttggatggctgctaggccatgggagactagacttatggacactgttgataccgctgccacgcctcctcctctgcctcataaacatttgaaatcaccggaaactgcggatgttgttcaagttagaagaaacaatgtgaccactagagtatctgcaaaacctcctcctcatatgctgtcttcaagtcctggttatgagtttaacgagagctcaggttcatcctcgatttgtacttcaactacgcctgtttctggaaaaactggacttgtttcagataactctagcagtcaagcaaaaaagcacaagccaagttacatgagcttgactgaatcgacaaaggctaagcgaagaactaaccgcggtctcaggcaatctatggatgagtttcagtttatgaagaactctggaatgtttacaggggaattgaagactagtccttcctcagatccttttgttagtttctccaaaccactcggtgttcctactcgattcgagaagccgagaggttaaatgtgaccttgttagattggagtttcaacagcttgttgttgtcttgtgtgttgtgagatatctgtgtatgttgttaattgttctttttcctttggaactacattggagttttgaatttaaatataaatttcagtcttgcttttatttcacttgtttcaagaatcagaatcttttgatggttctgagcttaaccccgttcttgaagctgagaattataccataatcaagctgcagtggtatctccatttctagggaatgtctgaaaatgtaattacggtagagatgcagtaatgtgagtttgatctcttgcagggcaaatctctgtccaacacaggctcgtggaccgataccgaatgggatgaaagcgtatggatgtctatgtttctcctcttctccgttcggatcaaatctttccggcttgaacttctccggttctggaaagtttttagggtcctttgctagaactcctagtgctaaccaaacccatgtcccctaagcaacaaccacaaggtaagtaatagattacaagtgctgactgtaaatggactaatccgcttgatgggtttgaatatacctttgggagtaaataacctcctatctccacttctttagcagtttcccttgcaaccaaaggagaaaccatgtagaatctcatagcctctttaatgacctacaaaggaggcaaataaaaaacattcataaagattctaatctctcacagaaactcaacttctcggtttttgtttgttactaatgaagcacctgatcgaggtatggaaacttgtgttgtaagtcatgagcagtcgggatcagatcacggttcccaaacccgtcaatttcttgaagcagacgtttctcaacatcaagatgaccagagactaagtaaagaacagaggatagtgtgaaagcagtggttgcagagccagcaagaagatgctcataagtcacagcactaatataatccgatgtgaagatgtttttggcgaaaggatcggactctcgagctttcaaaatcaatgacaagaagtcttttgagtcagtctcagcctccttggctcgctttgacacaatctcattaagttgtccactcagtcttgcattagtcttctcgactctccagtccattgttcccggtatcctcttcaacacctgcctaaacggctcttgaagaatcggaatcagtaagcctaagatgatagagagtgatcctgataaatccatcttgagttgtgttgtagagtagacatgctggtttatgaaatcagtcacctccacatctttgattggtttcttcccggaaagaccgaagtcgactccaaaagccgcttgtccgatgatatcagtggtaagtttgaggaagaggttggagaaaacgatatctcgcggtttagaatcaagattatgagtagcagaagtgatgaaactatgcattgtagggataagacttgttaaatgtgaaggctgatagagagataggatggtgtttctcattttagaccatctcttgtccctgtcaaagaatcataaatggttatagaaacaaaaacatacatagttttatagagcatgtatgtaccattgtacctggtgaagaagaggcctttcttgtgaagaggagaagctgagattggggaaggaatgcttctgtttggaagatctttgaacttctttatcccaacttctctgcaaagctctgcttctgctattattatcagtggttgcctccccatctgaaatctgtttgttgttaatttaaatggacatgatcacttgtcttcattttgttttttagacacttgttgtgttcatcactcagtcataacaaccataagagatggccatatataccaaactaaaccaaaatgattaaacaaaattaaacataatgtgtttataaatcatttaaattaaaataaactgaaaatcaaatgaaataatacaaaaactacattaaattataaatgtttttttccattaggttttcttaattatttatctcttttggttaaattggtttcattattatcaaatgactaaaaatgaaactgaagttataaataaacagaaattcattaaaaagttatattttttaattatatatgttaaaaagtacttgtatattaattaaagcactatttacatgaagttgttttccttattttaaaaatcaaactgactctaaagtctaaacagaaaatcaaatcaaataaaccaaaaattacattaaaccgaacaaattaactaaaactgtttttttttgtcgacacgaaaacttaaaaactaaactctaggtctctagccaccgaaaacagaataaagagagagagagaggagaggtacctgaaaatagggccatattgcttagcaagaacggagaagacatcaggaccatacttagccatcaagggcaagtgaccaactagaggcatagcggttggaccgggaacattgcatacggaccaggagggtcggtacaagtaaatcacaattacaaccgctgcaaaagtcaagaatgcaataagagcttcgtgttgtgtcaagaatggatcaagaacttcccaccattgatgttgcgtcttcatctctctaacctctaaagttctctcttctttagtttaatgtgtgggtttgtttgttaggtggttcattaatttatatagtagttgatgtgcttttgaaaagtgggttctacactctttccactagcccacctttagaatagcgtgggactatttcgcaagaagacaacatgcgttgaaattattagtcaagtactcaagttctcatctctactagagagtaatattgctaagttattgtaacgcacggaatccgtattaatttttatgtttttttttcttgtcaacatttaattatttagtgtttaattcgaaactatttaactatatttaatactcctctatgtttgcaaaatttacatattctaatatttttatattctgaatgttagttttttgtaaatatatgattataaataaacagaatactatcttttgagtatggggtccttttgatgtttgaccaatcttcacccatcgttgtacttttgttacactactatcaagtgcctctacttgtcaaaggggtttaccgtcaattggagtaaaccacgcttctacttttggtctcctttctccacttttttttttctctcttttattttggatcacaaattgttcttcctttttcagttgaaaaaattattgatggttctttagttttgtattttaatgggttagggaaagaaatggctatatatggaggagattgtttcgactttcgagtttggacattggaatataaaccaataattgataaaggagaaatttgatcattgcatgaccatcatttatggagttaggtgttccttttctatcatgattcatgatattagaatattagatcattgtcttaatttttggtttagagttaataatttttgttcaacatttctatatttttatacaaattttgaagtctttttttttttcttttctttcatctagttacgttttttttctctctccagattttctgttctatttgttagaattagagttaagttgacatgtatgtagtaagggtattaatttgcaccaaagctattgagagggagagacgaaatttcatcgaaatacgaactgttttataattcattctgcgattttttggtttgctcaaataatttttaacaaaaacaaaacattgctccaataataatttttaacaaaaaaaaaacattgctccaacaataatactaagtcaatacatgtaatgcagatattactcacgtgataatagctaatcgaaaatccaactaggaattggatggattctagtccagcccacgtaagtcctcaagtatctagggtttaagttttgttgtgtatatatatggagttataacagagagggcgagccgatgttgatcacgctctcacatcgtcgattgattcaaagatggaaaaacctgagtggtctgaattacctggagacctcatcaatttaaccgcaaaccgtttctcctccattagtgacgtcctccgtgtacgtagcatctgtaaaccctggcgttcggcggctgcgacaccgaagagctttcaatgcaaccttccttcctccaacaagatgatagagactgttctctctcccaccactttcttccgtgtaactggcccttcttcatgttcttacaaaggatggctgatcagaaccaaacaagtctctgaatccagtaagattaatctcttgtctcctttctttcgccagctcctaaccccttcacaacaaaccctagaccttttgaaatttgaggtttcagagattcgccaatcttacgagattcatatatttgataagtatttaatacaaggcgtgataggtaaagaaggaccatcacatatattgtctagagttgttttcctagacaatctgattttcgcagtcggacaggatgacaaaatctggtgctgcaagagtggagaagagagtagtagaatatggacaaaaatcaaaaaccaagttgaagatttcttggacattatacttcataaaggacaagtctatgccttagacctaaccggcgcaatttggtggattagtttatcaccgctcagcctccttcaattcacaccttcaattccaatggactacgacggatatgatagttgcaacaagagactcgttgagtattgtggagatctatgcattattcatcaacttcgcttaaagaaagcttatatccgaaggagtcaaaggacagttggttttaaggtttataagatggacgagtatgtggcaaaatgggttgaggttaggtccttgggagacaaggcactcattgtggctagggacagttgttttactgttgtagcctccgagtaccatggatgtttgaacaattctatctacttcgttgataatgtgcgaaagagtgtgataagaatgaaactatgaatttctctttcttatccttaaaatcccaattacaatgaaacaaaccctaaatcgataagcttggagttacagttctccaatcttatctcccaagaacagagcacataaagctctaatcctctttacacatcaatgatcacgcaggatgcttttctctctactctctcttactatttataatcttcttcacacgtgactccaatctctcacttcagttctcacacgtgccaacttctcatgaacgtatcagagtggcgcagaagctgatcaatttatcaagcatgatgatgagagttccgagtaccatggacttttgaagaattatatctacttcgatgataatgatggagaatattgtaatgatggaatgaatgatgaagctgttaagatgttcaagctt

SEQ ID NO: 286 - DNA, 115851 bp, Arabidopsis thaliana
aagctttgcagaagagagagatagagtgagtgagagggagtgattttgtttctctctcttgaagggtaaaacggtcataaaatgtagaagaagaaggagaagaagaacatgttaatggcagtggtgaataaaggaggtcgctttcgttgcccaatacttacgagtctttgtctctctgtggcttgtttcacagatgacccatatcaataaatccatcttatgggtacttttgtaattatgtatttttatatgattttagtgtaatttttttgtttgcttaacatgttcttcttcatcttcttacttcaattactaatttaaattcaggagtttacaaaaagtttggttcagttttctcttctttaattattagtatagttgttgtgtttttgtcaacgttttttagtatagtgaacgtgtgatttctaagtgtttttgtttattactaaatttagaaatatgcatgccaatgatttttggtttagcatcaacacaaaacttaataaaatatgattggttttaggatgttaaccggtttggttggctccggtcggtttgtcacaaaattaatattttgaagctttgagaacgaagtggactaaaactaaaagggtcacaggcccaacaaaagaaggaagaacttaaaaaataataattccttttcattttaacttctctttttttttttgttaaatcatttatttgtttcaataaaaatacacataatattatcttttctcaaaaagtactatatagttagaaaactacatatttattttaacccaaattattatttttccattccttacacactgtacgttacactttttattatcatttgctgtacaacgttaatatttttaaccatttctgcaattgtttacctctttttcatccgcaaatttctaattaaattatatgttgaatgttcatagccataataataatttgtccaacggagataagacgcctctggtgttatccccaatgtcgtcactccacgctaccgtgagcctcccactgttctccaactcaaaccacaaaaagctaacgtgcgcagctacattatcacctccgccatggaaacagagccggcgagttatctccgtctccttttttctctcccgtctcctcctcctccctaacggtacacgcatctctcttcaaattcaccaatccgattctcaatttcacgaactcgattttcaatatcaccaattcgacttttgttcatttcaaatttggttatttatatgttgatgatgatgatcagatgctatggctggtggcttaatggataaattggataaatacgtcaagaggtaacattaaatcgtctccgatgcttattcctttgaattctgaagttagattttgaaatgtttggtgaattatctaaaacttaaaaccagttattgaataggaagaaacttgatccacttgaagcatatgtaccaccagtgattctagctcagttacaaatccaggatcttggtaaaatttctctgtttttttgttacacatttgttcttaaaactcttgctatataaaacttacactcatgtttatttatgatgttggagagggatttttgaatgtggagaaacctgaatttgaggcgtgtagacgccaattgcggtctggtcctgctagctctcttcgtgtaaacattcgagctgtaagtttttaaagctcacttgatgtcactcatttggtttctgtttgatgatgaaatgtgtaatgcaaactctttcaggttgctcagtatgcttcagatgatggtttctccaaaaccgccactgatgatgttgatcgatgtttaaggtaccgacaatgtttgaatgaatgatgatgacctttgcgtgtgtaatttatgttggcttttccttctatagagcattggaagaactggattcgttgtttctacgtgcgtcgaggaaagattcaaatgcaactgttgtattgatgaagtcacagcttggaacagcgttaaccgcactggacagtcttctacaaacagttccttctcaagtgcttgataaagggaaagctatggtggaagtctacagatcagcatctgaagaagatgcgggaagtgatgatttagaatcctctgagataaagcagctccagtccatactgtgagaggggaggtcacaggactattactatccaaaaacagttgttaatcttacagcattggtatcaaaaactcttctgattcagtgtatatcatgtattgttaacttcaattgatgcatatattaaaaccagaatagtttgctgctaaagtcggcgaggtgacatgatccacatccacttaccggttctaccaatgcaacatctgctacacataaccgcatacgtatactggagtaatcttatctagcttatttccgctgggtgatgacacgctcatatatctctatcaattgttaaaccctttcatataagacatctttatgtttaagatttccatctaggaggattaacaaattgcggagcaaaatcactcttgagttcttaagagttactctcgattttgatatctttctatatctccaagaaacaagggttgtctgaactcaatgttcagtttgtatgattaaggtgtcgttcgtttgatcagttgactgatgcatctagatgcagatgataactgatgttcgtttgaacacaatataacagaatagtttgatacatcagttggctgagtttataaaactcattcaaaaaaattaaaatatttagctgactttgatcggtgcatctagatgcatcagctgcagtcaaaaatggtaaatctctaaaatactcctttaaaatttgaagaattacactaaaataaatatatgtcctttttagtcatttggtacattatgcattcagatgcagatgcacattgttaaaaaacaattcaaacgaacacatctgcattcaaatgattcatccagatgcactatcaacttcagaaacgaacatcatccaaatgatgcatctgaatggatcttctggatggatcacccagaggcactacctaactgattaaacgaacaacacctaacattttaaaatggtattgtgcctaatatgagattttcttgtcttgtaatagatctccaattgagattattatatgtaatatagaatgtgaaagaccacctaacatctccaactctttttaatgaaatgtaaaacaacaaacctctgtggtttctgcactaaatatcatagagaaaaaggtaggcatgggatcgagaatgatgtcagaaatatatttattctgtcttctctcataacttgttgatcttactcaaaaagtctgaagccgaagcagattccattcctgtagcagatgcactgtccttaggtgtcactgtcttagctgctttgcctttctgcagtgcctgtctttgttgatcccattgtgcctaaaaatcagaatgatacaaacaaaccaaacttgaatgggtattgggcgttcgacaaagagggcattcttgcttctcgttgcaccattccataatgcagctcctgcacatgacaacatgactttcaaaatgagcacaatgttccggtgtcaacttttggatcttaggttttgtagttcgagtaaatgttcgatacaaagttcatcttatcaaaagcagtttcaaccaatggacatcaagatattgaaattctctggattctgaaacttatcaaggtttgtaggtgttaactcgttccagatcaggcccaggacaaaataagcaattacggtagaggaaggtttattaccaacaaaacacatgaccacaaggagtggccgttgggtgctgacgggtgcttaagcagagagtgcatttccctactgcctgcaatcgaagtacatagcaaggtaaacacctaacataacaagtggtaacatattgatttcatcaaaacgagagaaaaataaacccctctggagtttttttaaatttagaatagtctcaaaataggattaacatataaccttgtctcgctagaaactatatgtagagcgggatcagtcgagtggccatctactcttatcagatactcataccaacagagtaaactatcattttggttttcttaatcacacttatacaacataacctttgcgtaagagcataatacattttgctcagagttatgtgcctctcttccaagtatattattacctattgtcctttcccaataatgatcactattcaagatattagccattacaaagtaacagaagtttctaacttatttataaatattttacctccgttgaagttgaatcggaggtagaccagtttcccttttcagcttccgaagttatcaaattcccctcttcatttaaaacaggtaaacctctccctgcaagaacaataccaaaactatattactgtaatgtgaaatagggtgatgcataacaagcagaatatttcagcctatgttatcttctctcatgtatctttctaacaaacttttaccatgatgccaatttagaccatagtttattgaaactatagtactgacaatctaacatatatatcctccacaaatatccgtaatgttgggaaattctagattattaacattcataatcaaggacatgagagccagacctcctgaagtttgataagatcctatagaagcctgctgaatggagctagtgatagatgacaaattactccgacgcaagccctcagcagcaaggatgcacaattggattagaaggaaaaccccaagaatttggtatctgctcaacaagacttaagggagttcagttactctgtgatagtaaaagtcaagagttgcaagtgtaaaagaagacaaaaaaatcattacctaggtctctgattcagttgctttcctatgaaaacataacgaaccccggatgcacgtttcgatatatgataataaaaacctgaaaagaaacaaaggttactagttcagaacatgctctacatgagttaaatatttctcacaaaattcaccttcaaagtagaagagcatcagattggcacgcaaaaccagttgtaagacttcgcgggcaacaggaagaacctaaaaggcacaaaaccttgtataaaacaacatttgctacgcagaaaacaagtgaacgaaccatggaaaattaaacgtgaggggtatacattaccacaggccatcgctgaatagctcggtgccacgatctcataagtctatcgtttaacctagatactacagaagttgaagtttcaacttgagatgaagatggaagatctatcattcttggtgagtggatatgactatcaccaaaaaactcatcagactcatcaaaggtgactgcttgcgtagcagctcgagtgctgtagacaattatatcaatatcagcggacaagattcaaatttttctttgtaaaacaacaataagaaatgcgacgaaacctaattctctctgcgatatatggaactgcggtctggtacaatatgaacaaagcacgtctagctggtgtaggagagagtccataaggccctgcaacctatattatatcattctacatcagaaggtaaaatggttttgtagaagcacacttaaggaagattgtataaagtaacaaaaacctgtataatgtcacaatattcctctcctaaagtttgttgccctgaacctgtcgtaagaacatagtaaagcatctgtccaagtagcttcatctatccaaaaacaataaaaacaaataatcaaaaatctcatggaaactcagacaaatataatttagtgtatattacctccttctggtaagcaagagcgattcttgtacctaagagtgataaaaattagttattaattggacaataacgatgaagcaattaaagtagacagttgttgttgtttggtttggtgtcggaaaaattgtaccgaaaaggtgtcggaaggcatcgcggcaagcttcgtggatgaaagaagcgtattgatcgtctttctcagcagctctcataatctccggctgagctgctaacgggaatcgtctgattccgccgtgaaacccgctcgaaccgggttcatcctgacccggacccgaatccccattaagcctcatcgtttcttttttttcgtggatcgatgaacttgccgaatgatgttttttattcggcctttgatatttttttttaattcaaaggaaaaataaatatttgcaaatgtatcgatgccatttatatatgagatcaataatattttattaattataatctttttaattatttttatgatcaaatatttgtctatattaagcagtattttgtaatagtcaatcgattcgggtgagctgattagttttttagaatacatgatgttaagtaaattatgttaaaaataaatccgagcaaagtgtttccataattaaattattaaaggagatattaaccttgacgaaaactttctctcttctctctcaaaaacttttgagagagagagtttgtttttttggtaaagtccgatcgtgatctcatatgcatgttctatcctcgccgtccggtttatccggctcctgtccagcatcgactagcttctaaagtagtgttggctggcttatgtctggcgatttgccgtcttgtttacggtgtcttcggccagttttgggtttgttaagtttttttgtttcaataatctcattagatctgagttggtgatgatgttttaggtgttgtgtcacttaaagaatggatttctccgacttgtttcttttgagcttttggtttgcagaaatctttccagagacataaggaaagaagaatctttcgaagcatattatgattgccttaaagctgttagtttctttttggagtttcgattagcttagcaacggtgacaaacaaaggattcaacgaccgattatatttcggcgataatcttctcaccgaaatcgatgctcaacggcgaaggttgatgtcggaaatctttcgattactcatccagcatgtgtcgtggttgtatccagttgctgacacgtgggcttaggtggagtacaaacaaattttcttatgcagtatgcggttatccgataggctcttgttgggcctcaaatatttctgtaaacttttcgtggggcttttagtgtagcccgtgtatgatcgggttacgtttaatacaatactacacttgagaaaaaaaaaaagaagtaaattatgttatttttgtagaatatatttttttttctcaagatttagaatacataaacatgaaataaattattataacacaaaatgttggtctagttttccaatcttactcactatgcactgattgattcagaggtgtgatcatagccttttgaagaagttcatagccagctaagttcaaggctccgagaggagcagtccagaaaaaccttggaacagctcctttgtagaaagcaagaggaccctcatgtgtgagaattgaataagcagccatcaacatcgacaattccacgccttgtggagccgtcatcattcttgttttaatcacatcgaatggcgttgttaaaactgcagtgaaaccaccggacaaggctccaaccgcgatggcttcccacggctccaactctcttcctaattgtctctccaccacctgtgaaactcaatcgcaaccacgtcttattaattacacaaagacatgtcattgttctgttctatcatgattaccttctttgattggttgtaaagtcccatgccagcaacgtagaagggaacctcacgtagaagggtaacaccggtcccacgaaagagtcctttgagcccttcttgatgccaagtcgaaactgtagcttccactatgttatcaaactggttggcttgtaaccgttgtttcaacacttcacacggtattcgcaacgttgtccccaataccgtaccaataaaagacgcgattgactgaacctaaaataatcaagaagcaaaaaaattcaaagaacgaaacattatgtagcaataaagttggcaatgagctttttacaattactaacttgaatatcaagaagagtaggagcaacgagcggtaacgcaagtttacttgcttcatatatacttgttcgtaaaccatgactgaaaaatgtttaaacaagagatgaaatcatgataatgcttataaccaataaccacaaggcaaagcataagagatgaaacctagcaaattgaccaacaacagccggaatcgagcctttgtataaacctcgagcaccaatctctggaatctttgacaatatttcgagaaacgacaatgtagttgatgcttgaacttgtgtcttaatgatccaagacaaatgtaagtaatcagaacaatctcataaacacaaaagaagaacctgaaatgaaattaccattataccttgacagtatccactggatgcatcaaaaaagcagagaaagcacatgagattcctccagctaatgcagatttaagaagatgaccaacatctaatccaactcttgtcctaacaaaacatgtagtttagacacaaatgttttaaagaaaaacagtatctacaaggttcttgtcctcacccagtatcaaagttcttgcctttagcaacagcttcattgatcaatggagcaatttcattggatcttgaagtaaaatttccaacttttgcaaaatttaagctaactataaagctacacgcatctgaattcgattttctacggaaacaagagtcaagcttttgagaatttagaaacaacaaatcattgagaatagagagaaggagagattcaggtgatacatgtttcctcttcggagctttattcaccattgttgatttcagtggatctgtggataaaccttgaaaactaactctgttcttcatccgtcattagaggaaaacagaagagtgatttaagtgagattagtcaacgtttgatccaaatagtggttttgattatcgaattaagccatttttgttagtctttgtttaaagtattagtaatttagtatacaacaacaacgcatatgaggtgttcgacgaaatgactgtgttaaaacaaattgagatgtgggactgaaacaaaactagaggtaactattttaaccaaagatgtcaaaatgagtaaccttacccaaacccacatggatttgagattttaatagacgagtttgacccaacccatgtatttatataagttgaatttatatactcaaatccacaaccataaaatttattggtttaattggttatattgatatctagataaaaataaaagaaaaatttataagtaataaaaatctaaaaaacatattataataaaaccaagaaaaaatttcagtaacaaattaaaaaatatctagatattaaaaaaaaaaaacatcttaaaatcctaaagtcctaaaaccacaaatccaaaaaaacacaaaatcatatatatatatatcataaaacatgttattcatgcctactatttttatagtctattagattaaaatattttgcttaattagtggaccgaatcaaagtaatatccagatatatttatatgcttcgttaaaagcgagattttagaatatgactttagatgtcatttgtatttttaaccaaaatataaataaaatgtcattggtattgccaactatgaccaaattcttcaattcacaggcatgtgtgagttcatgtcgaagaaattaaagattcacctatttaaccggtggtgcatctcaaagtggggaaacaaaaacctctaataatgaaagtatttgccaggttgtgtttagcttcgaccatgtggttcgggtatggtttattttattttattactatttcatcttatctcaaaaataagatttgtatgccatgttgcgttaacgttgaccatttagttccccagtatatggtttaagcgcaatgtatatctatgcatacatttttgttttttcggtttgtgatcggttttaaattttgtatgatgctaataacagttgtgttttggaaatcacgccgaaccaacagacatggtcgcagtcaaacaactccatctttgggatttttttttatctaaaagaattcacgtccttgtatataaaaggtggtaatatttgaaatattgagatttcaggcaacactcatttttttaagattctcacgtataaattaggattatatcatataggaataagtataacgtggaagattattatatagggatgaatcatccactagttaagcagaatattatattatatagactatataaaatactaggcatgaatgaatttaagcatacgtattacagacttgtttgtcaaaacaaaacaggcattaatcttttttatctttcgaagatataacccatggcgatatctcacgcccaacctgttctgcttctcctatcatcactctatttcttatctgcttttggcgccggcgcatacaattttgaaaactgcaaaagtaagtatcgtttttgttaagtcttatattgttatatagaacatcaattcttgttacttgataagtcaattcaatgaaaagaatatgcctgaatttcatagattgtggtttgctcctatctctgttttttgttttaccaaataaatcttgaaccggaactcacattagtcgtcaattccataaaacagaaatagagtattttgctactgtgaaaacgtttatatagaaagaacagatcaatgaaactatgaaagtactcccatctataaaataacccaataattgtgaagtattcaccgaagacttttttcttttttttttccttcagtgtggttttcgagagccgtggtgtataagtcaagaactgagtattataactaaaatattgcaggtccagagttcctccaatattcaaagatagatcaaacaatttgaaatctgatcgaaatttaaaatagatttatcttttgttaatcctacaaataaataaataaagaaacacttacccctatgaccctatcatttgacataccaaatttccaaataaagaaatttaggatttatttttgtaagaaattaggatgtagatccaagttttttttttacctgccatgacttactgataacttctacaattgttaacatgctctaaatcggtgcgactaaagatgcacctattgactacaattacggtattacgaacgtcacacgtgtggagatctctccataccctgttgggccttacgacgagccaaccattaccatatccggctttacaagtgatgatagtacgtaatattttctattcttttaattgttttcatttatagtttccaatatcttatcttgtaagaaaatatatttgtgtttacaggctacatcatctatagagcaactatacatgtgttgtataaatatgaaaatgtgaatagcactataataaattacgacctcagtgatgtgatgggtgaggatccatgctctattgaacctggcgaaaaatttgtgttaactctttccaaagttcctggtttgcagtcactccctcatgtaagtattttttattttaatttttggacaaacggtttcactttgataaatgtattttaaaaccgaacaatctaaaaaccacaatagtatatttacttggtttgcctgacggttttttttttctttctttaaactaattagaaggataagtccaagattgtcatatcccttgttgatgaatatggtgatgacgctgaagtgccactgctaaaaatgtgtgttgagttcgataaccctgctccaactacaacatcggtctctgcttgattaaatccaattggcttatggaaatatgttttcaattcttcatatgacactcccgtattacttgcatttttttttcccttttcgtgttgttcaacaaataaaagaaatattgaatttatagttttatacgactctctcgttaattactagcatcctttttatatttcagtaactatatagaaaaaaattctaacgcatttgctaaaaataagctacaacaacaaatctctagctatgtttttatcgcaaataagctacaacaacataataagctacatttgcacatgaataaacgatgcacgaatctgtctcaccttgttttatacgtatagagcgcacttgttttctagaaacttttccattataattgattagttcagaaaaaaattagaagatttgaaggtgttgtgtggcgatattcatataccaaaatcagtaacacaaaatcagtaaataaaggaacttaaagagaatacgaaaattaaacaaagacaaaagaagaatatggaacttgtgacacatgaagttcaaaaacaatataacatgacgatgaatgaatccattaacctttacaatgacttagcggggagccgcatagacagtcgttgccggcaaacacactttctggaaactttgtcaccggaagtttcccacaaagatggttttgactcaagttaagtgtctttaatccggccaccctcgccggcactttcccgaacactaagttccttgatagatcaagcgtctcgagcgtcgtcgagaaacttagcttcctcaaatcgaatcggagtttgttccccgacattcgaaactcccgtagttgctctgctcccttcaagaacctcagtggactccctgagatctcgttgtccgaaagatcaatggaaacgtagagatcagtttgccttgttttccaatcgtctaagctcatcttgattccacatttagccaacttcaaagagccgaggatcgacgctgaggtcacccattccgggattgtttccatgtgaaacttgttgtacgacagatctagagtcaagatgtaattcttcacgttcaaaacagggaatggattggttagaagattgtgagagagattgatattagcaattttagtcagcttggccaaactcttcggcacggctccagagaaacggttcttggagagatccagtgtgtcgagcgccacgaatcttgataaatagctcggtatcgaccccgagagattgttctgacctagctcaaggaacgcaagaaccggcgcgagcgatgcaatcgacggagggagcttcccggagaatctgttgcgtgagagagtgaggattcgaaggttagtcattgatttgaaaatatccgggatggttccagagagacggtttccatcgagattaagattcgaaatgagcttgagattagcaatccctaacggtattgttccggttaagagattaccgccaagatttaggtagtttaaccgagttaaattggatatggaactcgggattgaaccgatgaaccggtttcctttaacggttaatgtatctaagcggttaagcgcgccgatgttggctggaagaggaccagagagacgtgtattctcgaggtaaacatactttagatgtggtaatctgaataaaaatggtggaaatggtcctgtgatgtttttgagattgataaagacgaccccttccaaatgctggagtttggccagtgacggagagattgtgccagagagaaagattccggcatcgtcggactctatgcggatagtgagtacgacgacacggttgccgttagggcaactgacaccgttccaagagcagcaatcagtaccttttttccaagtgcttagaatacctgaaggatctttggttatacccgatttaaaagctaatagacccgcctcatcatcaggatgacacgtggctgctgcggtggggtttaaacaccggagaaagatcacggcggtgaaaatgaagaagttgtggaaagaacaagagttcatggtagtgaattttattttttgtagtgaggttgagagaagcaattagcaaactgatagctaattagtctaaagagagattagactcgacaccaattaatatcaaatagtcaaagttgacccatttggaccaatccatttgcgcgtaacgattaatacagtgtaaagataattaaataacagtataaaacgtgacaaaaataaaaactatatagcataataactaccaattatcttttgtcaaaaggttgttttgacaaaaagggtcttttgacattatttaagattatttagtattttataggagggatgtttaatattgaccgttataggttataaactctgtagaaaaaagtattcttagtagtgactttttggtaagataatccttttaaatggtactaatataatgggacaacatttggcatgtgggaaaagaaatatacaaatgaatgctaaaaggtaccgctagagcctagaagttcaatatacaaatgaaagaatatcaataaaagaaaccgaggataaagcaaaagagaaaggagagatgaatattaaaacgctaattcatgatgtagaatgtagatgatggcaatgttctcaccaagattgtctgccttaaagtcggaaaaaggtagattcgacgtaaacccatattttgataaaggtttataagaccaatatgccatagatttaaaaatgattcgggatatataaaaatgcagagaatatgtgtaatctatttgctgagattttcaagataaattgctccggattgtagttcatttgatagaaaatgaggacaatggtttctagacaagaacgtacactattagaacttacacaaagcaataaaaagaagaagaagcaaacttagtttcaccaaaccataaatatagacaaaatacaacaaacatatttcataatgttttctccagctaagtaggagacacaatggaaaagcacactaagaccacggggtttcctacattattgcaaaccgaacaacgctcatcacacgacatagttcaatcaatgtttagaaggatcaagaacttgaccaatgaacaaaattactccactattgtcttctctcacagtgaacagaaatggatggtcagctacaaaatccgggttccgcatcaaacattggggcatcatgatggcaacagagaccgctgcagcttcggttccctcttcatccacctcaatgcaagctttatgaataatgcttgagacgtgcagtttatcaccgttcgaaggcgaatcaaccatctcagttaaattacctttggaagtaaatggagaagtaagccccatgtctttcaaaacttctgaagctttaaactcaaaagagaagttcaacttcggaattctcaaagcatcgactggtgtacggtgaagtggaatatggctatcaagaaatcctggttcagtgcttattttctcaagcagagcagctagtccgtctttgtcattaggaagataaatgtacatggagaaatgacgtttatcctctacataaggtaggcgcaaaacttggaaaccatcatagcctcttagatattggtccttataactcatcatgaaggggacttttaccgtgttaccgtcaagaagatgaaaatcgttatcttttgttagttttgcatcaaattttctactccatgctgctttgaagtacactgcatttgctagaataagtgtgctattacggatctccttgatagtatcggtacaatcgcgtgaaagaatctgcttgatgagtccatttgtgtggacgtcagcccatatatttacctcatcaatcacttcaacaggcttcatgaccaagcgataaaaattgaccaatcattagtgaagttggatgtcatatatacacaagaaattgaagaaataaaaaaagagaatgtgatatagccgtctccttcgtaaccacattaaacgtcttaaataacacgaacattcacctttatatatctatgttatagggattagtctaagtttcggtcccataataattgaagcaaaatttatccctaacgaaaaaagttaccttggttgcgaagtcaacttgactacaagaagccttgtaggaattctccaaaagctctttaaaggaaggcttcaaataagaagacttgtcgatccagacaccgtgagccgtagataagcacaaatcacttctctcggtgccgccgtccgcgatcttggccaagaccgcgttaaggtgatccgtagacggtgacatgaggaatgagaggatttcttctttggtgacgggattagaaccagcggcgatgaggctgagcaaaacgttgattgacatcggtgaaaagacaacattggagccattggcgacatctgtttcaatgactttctttgctagtcttgccacgacgttgttttggttctcaattgattttcctaactccatttttttccaagaagaggtgtacgggaagatataagaatggttctgaatatgcagatgtgatgattgatgaaatagcttgtttcaagtatactagtagctattttttgttttaaatatattttctgcacatgaattattcaatcgaaatgatttagaagtaataaagtaccgcgtgtggaaaagtcgtatcatggacttcgttggaagtacttggcattaactataaactaggtcttgaagtttggttaatttatgccttatgggtcaatttacttggaacaactctctttttcatccttttacccataaggcatatgcataaaccaattgttccaaatcgattttataactctgggagttgccatttggaacaactctctttttcatcattttatatctcaatctaggaatctatcatagcttggctattctctaaagtaaatttcctttttctttactttctagcacttaaataaaactccaatgagctatctttttcagtttaaaatatatttctatgttaattagctcatttgaacataaatctttcttgctttggtgtctcctacatgtatattttggaaccgtctgtcaattggattggtggattccgactcttatatcaaagagaaacaaaataaaaaaacagagtaataatcttattagagggggaaaacaatgtttttaaaaccaaatcattgctagagaacgtgatttcctagcgaaagtttacactttacaccacaatatatactaacgtgcatgtgaaaagaaaagaaaagaaagagaaaaaggttgagatgaatgtctgaagcagccaaatcttatactccctctgttctataaagtttgatgttttgagttttatttttgtttcatcaagtttgatgttgtaggttaatattattattatttttattagtaaccaatagagagaaaagagaagtaaaatttatattattagattaatagaaaagtaataaaaataatattaaagttacattttttaatttgtgtgaaaaacccaaaacattatttttttaggaacagagggagtaaacatgaactggaaaataacaagacatatacttgatgtgtacatgtatcgatttcttcttcttcttttttatcttttttttttttagttaaatgtatcgatttcttagtcaccaagaggcaagaatataacaaaagactagaaattcttttgtttgattttatttatcattgggtacaaattctaaaaacatgagattatggatactccataagtaatgtgttcaattcaaataatcattttatttatttacagtaacggatgtatatcatgtattatgcatagacaccagtaggttgagactaatagtgaccgatagttttatatattttcttgctttcatatattgtcattttccttcttctttacattacaatcacaacaataatgccaaaagacacatgaaccaaaatgtcttcggtttccatgttgtaaacataataaagcataattaaagacaacatctaaacatatgtttagcttatagaaatctgatccccgagagttctttacgctgaagcgtctatgttacggtccccaatcaccttcaagaattttttcatatacgctttcctataaaatagccgtttgaatatacataaacacttttgtcgcctctttgcttagatatataactacagatctagtaagctttgtcgtgacaatatgggagaacaagacatcattgtaccttgcaggaagatggtcatgtgggcgattataagcagtccacactggtccacccacgaaaagacgcattgcctgttcaatatataagaaaattccaattttctaagcaaccaaaaatatattacttgaaccttcatatagtatgaattaataactagaagaagctaagattgaaccttcatatagttgtccgagtccacggtgaagcgatgatatattccagcagggaagactatcaaacctcccttctttacccatactctaatccaaatatcattgagatccctcacatcaaagtatcctttgatttgtttttaagaaaaaataaaataaatgagcaccatatcgaatttatttaagtactaaagcagcgaataaaagtacctaccacttcctgcgaggcagtaacggatctcttcatcaatatgtaaatgttcttcaaaaaacatctttactttttcttcatagtttggaagcttctctggacacacctcacataagtcctaaaaccaaacatccaaatgtttgcgaatcaaaaacgaatatttaataatcaactaacaaacgaagatttattttttgttaaaaaaaaagaccaaacaaaggaagatattaaaaaaaggcatcaaataaatgtcacaaaccatgtaggagtaaccacgagattcgcggatccttttcaattcctcatcggtttcatagttatcagcatcaagtctccagcaaagtactccaagctctgaacaaaaaaaaaaaaaaacattattaacctacgtgaaagaataaaagtatgtgcaacaatgaagatacacacagacctgcaagtttgtccaaagatacaaattccttaggatccttgtggtgaggaagtttctgatcctcttccttattatccaagtaccaagcttgaatcacttcttcagtttgatcctagaaaacatcaatctgatgctaagcaaaaacacttctaaagtaaatgggaatagatcctaaatcaagaaggaagagtttatattaccttagcggcttcacccatggttattcttcttttgtgttcaaaatgaagaaagaaagaaaccatttatatagataaaaaaggaaaccgctagcatttttctgtgtgcaaaaatgtaaagtaagaacacaaaaccactctttccatttcttaggcacctttatcgagaagacaaggacgtcacgaagtgtcaaggagatgacgaagaagtgatgacgtcacgaagtctcacgacttctatttactctatttgcatttgttaaataataagatgctttgttcttatcaattattgttcttaataataagacttctatccactttctcaggtctttggtatttgtttcgatgtacttaactttctacgtgtaaggaagcttcatgttagaaaaaaataaaaatggaagcgtcatgtatttgttatttgtttcagtgtacttcagaattagcttttttttcataaatattatcaaaatctaagactatataggcttccaaaaaaattactttggaagctcattggaatcttatgaatttttttaatggaaaattgtgtttctattttaaaattttgatgtaaaaataaataaataaacatgaaattatttccgataatcttttctacacaaaagaaaaccaaactagttttgtgatttatataatttttcatagtaatatttaaattttattttcagtaagaccatgctaagaaaaatattaacggcatgaatcatatatgtgtgatattcgaagttattaattgaattaaaattaactttgagaaacttgagtttgatgatgttattacggacaaattacagagaaagaggaagaatgatccactacatgaagtttactaattcatagcaacctgtctgattgattgatatgtctcggccagaacgtaatccagcaatagactcaattgtacatattcattgagagctccacaatccaaatttttacaatcccgatacaatgtcttgttttttttttttggttttaacaaactcttaaattgataacaaactttgtcacaaaccagctccagttcacgtagactctcgtttactttttgtaaccattgcatatgtcattttgaatcgatttcaacgactattttcaaacattaacgcgaaataaatggtttaaatttttaaaaaatgtaaacaaataatccaccagataaacaccaaaccgaaacagacatacatcatttgtactcacccaaagaaaacaatcaaaataaggtcttcaaaatacactctttgtttttttgttttttctttctcttttctatttgcgttgatagaaaacaaatctcacatttgagatgctaaatctatcaaaccgccaccaaagcaatatcttggtctagataaggctattactttaggttaactgctaccaccatttcttctcttcttctctccatttgcaacaccagttgttgctttatccgaatccgacaatttctttgttttcccaagagaagtagaagatgaaagcctcttctttggcaataccatctgtggaggtttcttcttatcagcaacaacctccttctttggcatacttgttgttccgacattaaccttagatttcacagcttccgtgttggccaagtttcctgttgttcccacactagacttggatttcaaagttttcgtgttatccaagtttctttttgctcccacattagccttgggtttcacagtttgtgcattactcacgttgcttgttgtttccacactaaccttggatttcacagtttgtgtattatccaacgaatttctgcgcgaggatgagctaccaacgctttcatcatctttagcgttttcagatgatccaccaccgatactgtgcctgcgattagtaacctcgatctttctactctttgtatcattgtttacaggccattgaatagaactttggctagctgacttttgtgttttagatctggcaggagaactcttgatcgagttttcgcgtttaagagaacttttaacggaaacttgatcgtcaatggattcagcatcccacggacgagaagccatccacctctcaagccaactccaaccccaatctgttgtgtttgtgtccatcaaagtctgatgtggaagttttgaagagtttctccatgtttgctgttttattttccaacatcaatatataaacaactatgactaagttcacaatgatgttgtctttaatttatatttacctgatgactgtaagcatacgccaatgccctttctcgtcttactgaagcttcttttcgattcaccgaccttgccacgatctgttcctttgatttattgctggaatcaaaatttcccgcggtaacctacaacaaaatatgctccagttcagaattttggttcacccagtgtggtaaaatgtagggagattttaccacataacaatgggatgactctttttaaattttgtcatatttttagatgaacggttgcatatattgtaaacatggttgaataaattttacattcattcaacaaaaaatgtaacgagatttaccaaattctgatggttttctttctggtgacccttctgttggatcagcctgtgacgagttttgttctctgcagataaccgattcctcctctcttgaatctgtgtttgtaaacgtgtaagagtttgcattgagctaagcatcgcattcatttgtcttttgacgtattttccttgcagcaaacttttgagtctagccattcctcgcagcgcacgaagagtgcgtctcgcctatgaaatttcaaaatattagactaagtctttcataataagaggaattagtgattttttttgtattttgtccaaaaaaaaaaaagtgatttttttgtataccgtgtaacatctatacgcattttggatcttgattgcggcagtttcctcctttgattcctcaatttgaggtgttgatggggtcgtgagacgtataacctccgcggcagcatgtgcagctaccacagctgcttcggctgcaacagccgatgcaagagctaaagcttgtctattctttgattctttagactcaccatagattcttgtattgatggtatatgccggaggaggaggaggtggagacggtggtggtaacaacggctgaggagcaaaatccggcaacgggggaggcggtggatatggacgatgaacagaagaaggtgaagggtcaaccggtggagtctcctccagagggaaatcaaaagattctctactcttttgtttcccaaacgaccatttcctcttcggtttctcgggtttcttgataaacaaggcaaaaccaaaagaccaaaatcaaaacaattagcaatcttgatttcataatcaggttacataatcataatcaataattagagaacagattcgaaacaccaacttgattctttttgtctttccctggagataaacaagccacggagacacatgttaaccagttcttacccattttctcctgaaattttcagacaaatctttcattgaaacattttcttacaaaacactttatgtgaaatcaataagaagagatgagattatgtgaagagacctcgtcgtgatgggccccaccgattcgtgggaacccaattgacttttgtaacgattgtgttttgtaagaacgattcaacagatttaacgacagatacgttataaattataacttctttttagttgtttttttttattttcattctctgcttagttgttctttctatatgttatttttatctttttttttttttttaatatttctggtgttgtggtttttagaattacagctttttttataacaattatctgttagacaaatttagaaaattgagtttaaagttttgatgatgctaatgctctttatccattccactctgggtttgattctcactctcaccctccattattttgtttggttgagagttttcttaatcaacaagaaataagttataaaaccaaatcccaaaaccaaaatgaagaacacatagtaacttaaataattcataggttggttgaagagaaggggctacttgagagattggttgtcaagctacaaatataattacgttagaaacccaaaaattcataggtaaaagagttggttcaagatcccaattttgcagttataaacaaagggttattcgaaaatttgaaaaaaattaggaaaatgtttttcggcaggaaaccaaatcaccatgttttgtaactttatccattacctccatttacctccccttaaataaaaaatactctgcaatatagcatgtcatcaccatcgtcaagtttataaattatgaaacctaaataaaatattaaatcaaatttctcgcgatgaggagactaaaataaattcttataatttaaaatctaatgtatgtaaataaataaataaatactcttcataaataaatatatgagagttatgttgaaggttattttgacttcacaggatttctctgtattttgtggatatcgaaagtaaagttacaaaaaaaaatgacttttgaaggtaatttttcagagaaaaaaaataaagatgatataactcttcaactccataatgaatccaagattataacgtacgtgtaacaattatttatctttattaagacaaaaaggattataacgtataacaactttgtgtagcttacttttaattctatttaattatttagaagtcggcagagagagtacgtgcgaacctcttaatacttgtcgtctctctcctctttctactcttcacactaagttagaggtgcttctatggccatgaactcactcataccacgtcatacggccaaagttcaattgaagacagattgtttaaagctaattaaaatgatttgactccaatgaattagatgaattttctagttttatatcgaaatttgtattttgtttaaatttgttttattctacgtcataattcagtttgtgatgatttcctcgctaaagacacaagaatatacaaatgtcagcttgtagtttaggtgccgaaatggttttccctcgaggcacctatttggcacctaaaaattttgaagggagagaggtgacctttttactcttgaggctttcatcaatcccgtgtaaaccagcctcacaatcttatcaatatggagattttgatttaatgtaggaaaaataaaatttcaagtgtggtttgaatcattatatatagcctaaacgggaattgattcaagatcatgtcataaaataattttaaaagaacgtgtgttttctttatcgtttttgtcgaaaagtttcagcacaaaatttgtggtaccaactgcctaattctctaacaatgatgacttctccaatttggattgtactcgttgtaccaccctacgtactcgtgttcctctagtgtaatttatcccctcactaaaattatgcgctacttgagtagtacacatttgcacaacctaggttcactcaccaaaacattaattttattattgatggatcatgccgtttgctaaaatttgtatatgttcgagacggatttttgaaattcacctgataattttattttatgtgcaagctgccggtggacaaacttaacctttttcctataaggacttcctcttgttaatttcatgttgccggatggcttgaagcaataacagaaattgtataattataatttgaacaactatttatgaaaaacgtaggtattatagatcgttagcttggatcatcctagtagaaaacaatattacaaaaagaaactatttacaaaaagcctatcgatatatatataaagattaagagtaatgaatcataagcagaaacaaaatgctaaaacatttactcttttgtccatgtatttctcagctcggctcgccatatataacaataaaatgaagaaacattatcctaatatctacactatcttttgaggaagcaccaaaactctcttcctctttaaaaaatgagtgaaccccaaaaattcatcaaaacagccggcaacctcttcaacatcctggattcgagcaacattgcggggtgccgtgcgatctcatcgtgtgtaggggcctcaagggtttaaaaatttgacattcaaaacccaaaaaattaaatgccaaacccatgcctgagattctgatgtaccgtaaaattctttttctttgaacttgtgtaggtgttgcacgttacttaaattcattctcatttgtcttcaatgaatattttgtttataaagtctctaaatcttcgggaataaagcttaggatcaacagctgaaatggacgcgggatctgcgtggagtgacttgtaggcgtgctctagttttttggtgatatcatagtcttgaagaatgtcaataacaccgaaataaaggatcacctcaacggcttctttccttgtacccttaggatttgagttgtcaattgcatcttcttcccacgtctcttcctcaaatctgctcacctgctctgcttttgccggtgtactttcccctagtctcattaagggtccattactacattttcaaagacataaacaaaaatattattaaaatgaaagagcatatatttactttgattttaatctggtaagcttttgtgagtgtatgtataaaaatgattgtacaaggttcatttgaagttagtgagaaatgttcaatcaagttaacatatatatatgcaatatggtttaaatcagttttgttaagttgatccaaaatgaccactcatatgaatgaaagaatccaagacctagttgggataattttttgttatatctcctattgagtttaagtattcaaaacatgaaaaatgctaggtgaaggtaccaagtttgggtgacagagtccatatttggaagcgaattataccctctcatcaatttgtcctcctgatctcgtcgacctgaattaagaaagtagcttatatatttagacaaaggaagaaaaataccaaaaactaaagttgaaagaaagataagaatgatcgttaccgatgcccaaggaaatgtcgtcacgcatgccagattcacggaaatggagaccaatcaaaagactataatccataatcctctcagcttcaagaaactcacaatcgaggtcgatttggttaatgaaggcttggaaccatgaggtctcgagtcgaaacacatacttgagatccaagtctttgagtgttgtggtctcgtcgatttcaccttcatctttgtcgatagtacggccatgtgatgaacctttcaagtcaaaccgtttgtgtatacgatactccgaacaaaacagatttcccatcactatgaaccgagtctgctttttttttttggtcacaaagaaataacaaaaattcagcttttatttgatttatgaagataaacttgtaatggaagaccatttttcataccttttggcctcctactggtttgacgcaatgcaccccaaagaacttggtgactaaagagttcttgtacttggaaacatgctcgtaataatttgggagcatcttaagcaatacctaagcatggtttaaaaaatctcaaaatacatatgttgtcgaaagcaatgtgaacgcaaaataagatataatttaccttaatttcggattttttcatggttttgatcatgtagcgttcatcttgagtcaagtaaaaagcgcttccactctttccaggagatgcaaattcccgaagagattcatttccgcaaatagcgagcatgtagtccgcttggtctatcgcgaataaatctcttagatgcctgtttcaccacacaaaaatgtgcaatcagaattaacaaattgtttgtactccaaagttttaaagtatttacttacctaaacacaatagggcaatagtccttccatttgaactcggcagatagatgaggaggtgtagacttagagccttctgggggaaacctagtccattgcttatccttgggatcaaaatcactatgcctaagttccctcaaaagggaagcatgtttcccaacagagtacctaatcccaagttgtagatttaacattaaatcatagttcttatgtccagccgtaaccgtatgccccggtttcttaacatctccttcatccaaccacctaggactttgttgaacactcatggcaccaccactctccaaaagcaaagggcttcttgcccactcttgctctccacatccactcgtatccgactcgctcgtgtatggactcgcctctacatgatcacacacgccagtatcctccaattccgatatacaaatcctcgggaaattggtattcgctgacaaagtttcaacggaagagagcttatggttctgcacaatctcttcatctttcttcttgctcttcctcccccacccattataactagtcttctcttcaccccaactcaacacccctttcccaaccggggctccattttcccataacccatcataacggtttccattagcccacgtcattttccctttccccgaaataacaccattcttccactctcccacatactcattcccatcgctccacacataacgtccattaccatcttgcagattggccttccagtttccttggtaaccatcgccgtttgcataccgcttctctccatagccatgctttcttccccacagccaatgccctctataagtgtcgccatctattccaatgaacgttccttcgccatccattcgaccgtccttgaactgaccctcataggtcgctccggacggccaagaaaaacgtcctttaccgctcgctttgccacgtgtccactcaccctcgtacatacaaccatccgaccacaaatacttccctgtcccatgcggaacacccgctgataagcctccgttataaaggtcgccgttctttagcaccttctctactattctaatctcggcagccgtatcactcacctcgcaacttgtcatgggaaccacccgccgggagctttgtttgtacttgacccccaacgattgctctttattcagattctcttccgtgaagaggaacactgtctcttgcattattatatatgtcttactcagacatttctcgttgacttttatccggcttgtttgtctcttccaataacatttagtgttcaaacatttcttctgttctgtaagtatttaaaaacaaaggtgatcaataatgaccctaaaattactttgatgctaaaatctgaatgaaattagaataatcaaaatcttgtatgaaaaaaaaaaaaaaaaaaaaaattgctaagagtttaatgtcatcattgtaatgttatgtcttcctttaaattttggtatctgaaaggaaggaaaaaaaaaaagaaaacaaacttacccttgaatcatttatagattggattcgttgactgagaaaagaaatgatcaaatggactattcaagaacccatatcaagaagtaatgcatgagaatcaacacatcaaaattctcagaaaacaaacaaattgttttttacctgagtaatagaagtgaaattgatgtatggtcaaccgccatgacaaaggagttcagaaaataagatagtgtgatgatagaagtgaagacccaaattcataaacttgatgaaaatcttgaaaacagagtatggtcgaatgaaagatttatcagaatgttaggattggcgaaactctttttcgaaggagataaaatcgacaattcaacgatgaaaatgtatccgttagatgcgtattagctatttgttttgattatttatgtagccggcaacaagactacgtgctggccttgatcatcatcaatctttatactaattttataaaccattaataatgtaggtgtttagctagaagatctagttcatggttcgatatcggtattaagaatatgcgatagttataggtggagctaatagacaagtaagtaatgatataaaaaatgcttttgaacgtgctttaagcctaccatcatgtgccacaagtcagatttggatactattattctcctctctgctcggtcacaacaactcacaagtcaaaagtcaaaaaaccacttttccaaagtttaaggcacttttcacaaaattccaaattagaaacatatcagactttctcgattttatatgtcgaaccaacgtgatcttagcatgtgattaagtacacatgggttttgactcttaacacaatacaacactatactgtcttaacatcaagtaggctcaaggggatgtagatgacaagaagattggcttaatggtgcctacgacggtctttcgatgagtcgcggtagtcacggtcccgagaagaatgatgccttgatttatctgaatgtccacctgaatccttcaatctgtctcttgaccgatgatgacttcgatctttgagtttgtctctctccctatcactgtctctgtcagaatctctgcctctgtgagacctacccctgtccctctctctacctcgttccttctctctatcactctctctttctctatctcctactttacttctttcatagcttgagtctcctacaattggctgagagtttgactcggtaccacttttcttggaatctgtagccttttcgtgtggtgtagtaaccattccatccttcaagtcgttattagctgatcctgcagtacatttagtatcaacagcctcgcctgctcccggcaacagatcctgtaacagtgttaaaagcacttcaaacctagctctgattacagacatagaaaatgcacttggattgcagattttcccaagccgaaataataaagtagacagccctttttcaatactatataacatgcaatgtggtggtagaaactctgtttactactgtgtaagaaacgcactcaactttaagagtctataatagcagtaatatggacaataatctcatgttttcacaaaaattacaaaaccaagaaagcgatctacctcacctttgtcgctgattgaccttgagaattcccggatctgctagaaaatgtaaatggcttcccatccttgcaaacagagatatactgagcctttggaagactgtataaatgagcaagaactctacacacttcgtcaatactagatttatctgcatcaaatgctttccaccacggcggattctcagggagtggtacttgaaacctacgggcagcagcatacactaccccacaagccacaacctcacttctgaaccttacacagagggttgtacgcagactgcattatagacatatcatgagattaagataaaatcataaaggaattatcagatattgagaaagtataacaaacatactcaaaatcaaactagaacaggagaaatgccaagcttcaggataaacatcaactctaaaacctatcaacactatgatgtgtagctaactattaggaaatcatatgaaataatatccatattaggattttgagaatagagattacctatcattggccaaattccaagcttcttgcctcaattctggaggtgtttctaatgtggcaaggtagtttgatatgaacttgtgaggatgttcaacatgacaaacaaaacccatctctttcagtatatgtctctcagttctgcttaattcaactttcaactcagagaacttctgcagatatttaacaagtaggaaaaaagatgagatcccataaaagtacttccaaataaagctatcccatgagtagaaacaaaatatacgaaaaaaaacattcaatatgacaaatgcaattgcaaactaaccttggcatacatatccagatgttctaatggcaagttctccctgcgacactccatcctgtggaatacgatgatgacctgtctagcttttttagggttttcttccagttttgatgcaagccatacacagctggcagcaactatctgtaaaaattaaactacatatcaaatcattatggtcataggcaggagtatatacactcctaaagaattatcatactttcataaacacacaaaactagaagaaagaaacaaaataatttaccttgacatcaaatttagccaaagacttcttgcaatagaatcgctgaaacagaacctgcccagtagccataactgcctgtggtctaaaataaacaatctaagttaagaaaatcacagctacgtaacatttgagtcttgcttaataattagaccaagaaaaaggatacagtttgagcaatattccaccctcttggatgagatcacatccatagattctaagagagatttcagttgtttcatctatcccatctttcctcgaaggtgaagccttcagctgctcgtcggataggtaaaaattgtcgatagcagtgtaaatcatcgattcactaaacaacaacggtcactgtttaaaatcaagagaagaaaaacttagattacaacagctttacttcagatatcacagccaagaacgtaatatcgcatacgagaacaaaatcgaaataatgaacattatacacatgaaatcaatttgtgactaacaaagttaataaaacatctcataaatgaaaaaacacaattacaggttctatattagccaaacttcagaattaggattctgccaaaattcagaatctcacaaattgattgctataacagagagacgagactatattgtcgatttttgctacatttagtaatgagattacgccctaatttcaactgagatcaagcaattaaacctaactgagattaatcgcgattagaaatcaacacaggttggattaaaaggggaaatggtttaggatgtaccggaattgggagatagacggcggcgaaacagactcgcggcgaggagagcggagagacgagaagaggcgacgaaatcgggaaatcgagtttgttggagaagtgagggaaaaaaaagaagagaaattagcaaaaaggaagaaaataaaataattgggcctactctaactaggcccttattgggcttaggaaggaagaaaaatgtttttaggattcgatgatacatgtaattaactaattaagagatcgattgtttgaactgtggtgatgtctctgctccttccatagatgttaaataatctaaaattaaaaatttcgataaaaagttctgatggatcatgcatctaaattttaaaatgtgttgccaacattcagggagacaacacgacaaatttataattttcaatttggaaaataaaatatttgattgctagacccgcaaaatatattcaaatcaaaagttacaaatgcagcccataatttttgtatgctcttagattcgaactaccaaatccagaaataaaacacaaaattacagtaaaggtactcaaaattcatatcaaatttcgagattcgtcgaagttcgaaagaagataagatcgaaatcgagacactatagtgaagaagaaagagtttgtttgaaatcagaattttaatgtgaaatctcaaactctacacataaacgatgtcatttgtagttaagttagaaattaaaatggccttttatgggtacctatttatttgaaagaaaatttgcataattaataggtttaatcggactatcctatttaacattacttaacatttttctataaatgtgcttaaatgaactattttctcgtaaataaagtaatcaatactgatctagaagtacaaaaagcaattcaagaatcaatcattactttatttatgtatcaaacttatatttcacatcgtaggcaaatgccgttactaatcaatttcaaaaaaattgttaagactaaaaagccccaatttttccaaaaaaaaattttactaagaaattttattttattttgagttttgcaataggtcccataatgaattgagccgggactggataggaccaagtgtcgtatgatcaaaatatacaattgtgactgggttgggtctaaaagtctaaaaccattgcctgaaacgttatggttcctcgtagttatcgttaaaagagagattgtttcaatcttacagatcttattaaaatagtaaccgatgtgaatgtgatcttattactaacaaaatcaaaatccaaattaaacaacaatcagagacatcgttttctctatatactatatttacttaaacacgatcgatcgaatattcaaccaaaaaagatatttgttttgtcgtctaacgaagactaaacaaaacattaagtaaacccattcctttgtacttttaaaaacatagcagtctcttctctacttgctccaagccttcaacattttcttctcaaatggcgctctcctctttcaatctctcttctctattattcctcctcttcttcactccttccgttttctcgtattcgtatcaaccttctctaaaccctcatgaaacttctgctacaagtttctgcaaaaacacaccatatccagatgcatgttttacctccttaaaactatccatctccatcaacataagccccaacattctctctttcctcctccaaaccctccaaacagctctttccgaggctgggaaactcaccgatctcctttctggcgctggggtctccaacaacctagttgagggacaacgtggctctcttcaagactgcaaagatcttcaccacatcacttcttctttcttgaaacgatcaatctccaagatccaagacggtgttaacgattcacggaaactagccgacgctagagcgtacctaagcgccgctctcaccaacaagatcacatgcttggaaggtcttgaatcagcctcaggtccactcaagccaaagctcgtgacctccttcacgaccacttacaaacacataagcaactccctctctgctcttccaaaacagagaagaaccacaaatccaaaaaccggcggaaacactaagaaccgccggttacttgggttatttcctgactgggtctataagaaagatcaccggtttttagaagattctagcgacgggtatgatgagtatgacccgagtgagagcctcgtggtcgctgccgatggaacagggaatttttcgactattaacgaggccataagctttgctcctaatatgagtaacgacagggtgctgatatatgtaaaggaaggtgtgtatgacgagaacattgatattccgatctacaagactaatattgttttgataggagatggatccgatgttacatttattaccggaaaccgaagtgtcggagatggatggaccactttccgatctgctactcttggtaaacatctttgactcttttaaaaatcttgtttatataaaacaagactcaagtggtatagtttggggcatagtgtagactttaggaccgtagaatttttgccttttttttgtcaactaggaccatataatttaattttaaataattatatatgaattttctatgaaattaaaaagtaatattttaaatcttacaatctttggtttaggaaaaaaaggtgaaatagttgtgaacataagtaatcttgtatggttcttggagccatatttgttgcaatgacaaaaattaaaagcgataactaaagtggttggtactaaatcgagatagtaatgcttttcaaacttgcttttgtcacagcggtttccggcgaaggattcttggcgagggatataatgataacaaacacagcaggacccgagaagcaccaagcggttgcactacgagtgaacgcggattttgtggccttataccgatgtgtcattgatggttaccaggacacactttacacccactcattccgacaattctaccgtgaatgcgatatttatggaaccattgattatatctttggaaacgcagccgttgtcttccaaggctgtaacatcgtttcaaagttgcctatgccaggacaattcacggtaattactgctcagtcacgagacactcaggacgaagataccgggatctcgatgcaaaactgctccatccttgcgtcggaggatttatttaatagctcaaataaagtgaagagctacttgggacgtccgtggagagaattttcaagaacagttgtaatggaatcttatattgatgagtttattgacggttcgggttggagcaaatggaacggtggggaagcacttgataccctttactatggcgagtataacaataacggtccgggttctgaaacggttaaacgggttaactggccgggttttcacattatgggttacgaagatgcctttaacttcacggcaacagagtttatcactggtgatggttggttgggaagtacttcgttcccttatgataatggaatttaacatttttttttgctagaaatgtatagggtttgtcttcatataaaaatctaattacaataattaataaataaaaatctaaataattctatggtttgagttatttctcaaagctgtgtattaattaagataagctggcaaaatatgtatctttcttgaaaagtctaaagcatgtctttcttggctttatctgagtttccactttttaagaacgagaaacccatgcgaccatgtctttttgaaagttccaacactttaaattaaaacatgcttgacaagttgtgttctgtcagattcagtggcatattttatttttatgaagacggtgctgctaatcaaatgcttaaaagacggtgctggtgatacataactaacgattgcatttttgttttaattctttgtttatatacctccttaattgtattcagagttgaaaaacaaatttgtatacacatacggtagccagtcgcatcttcttggctttgcaaaaagtgggttacaaagatagcattatacacatagacggatccataaattattgtacatcgaaagataatttttaaaatgttaagatagtatatgtttggggcaggttttcgtaaatcgtaatccaccagatcattacatttgtttgtagtcgaaaacgttgttgtttttggattactattgagcaaaaagtagacaacccaagcaaatttaactcaactgtgttaggtgttgatgattttgcttaggaatggacagaaaaaaagttgtaatctccaatatgtaagctagcatctgttattgcgtgaggcaaagcaaacaacgactagcatcctcgcttgtgtcactccaaacaactttagagctaacttaagtgataaaaatatggcacaagtacttgctgcaacagcaacaccattcacgtaatataagttacacgtattaataagggattcgtctaaaattcggtgataaaaaaactaagatacaaatatactattacaattgttttttttgttttttttgggttgaattgttcaatagaattatgtaacattcccgtgacaactcttttcaaatgggatttgagatgtttcccaataaaaaatgtttacgtctagtcacgagtgtgtctcttcaatagtcatcacgtgatcataacttggcatttgctcactctgaagttttacatatatccaccaaaaccattgttgttgcctcttttcgagtctggtgatgtggtcacttactcacttactcacttacctatatgatcttaagccctaaaaagataaggaagcaccaaactgatagagaccgaattaataatactatttacttttcattattgtcttttattagttttattgttttttcttatagctagattttcctttgtgatttgcttgttcgccaaggtgtattcctatttaacgaagacctatgagtttaatagagatcatccattaagatatcaaaagtggagttgttattttactcgaataaacgaaataggagattgacttcgttttgatttttgaccaacaactctagtctagcaataatgtatgatacaaaaaaaatggttgctaaatttagaaggctcaatttcttttcaaaaaattgacatcagcccacaaaactctcctgtccagagcagatatgttcaattgtagaaattgcaacaaaacagtaacaaataaaactgaaaccatggaatgaagacaggggagagaagacaagaaagagccaaaaataaaacgtaaaaaggattcatctttccttttaacctctctgccttggccgccttctaaggcagaggagattcatttctttctctccccaagaaaaacaatacaaaatttcagaaaatttatagtaatttcagtatggcgtttcaggattttgacaagatccaagaacgtgtaaacgccaataggaaacgtaaattcaggaagaggatcatcgttggaacggtctctttgcttgtggttgttgctgccattgttggaggagcttttgcttatgttgcttatgagaaaagaaatgaacaacaacaacaacaacaacaagcaaagaaccacaacaaaagcggtagcggcaacaacgtcgtcaaggatagcgacaagaagagcccgagcccaccaaccccgagccaaaaagcgcccgtttccgcagcgcagtcagtgaaacccggtcagggtgataagattatccaaactctctgcagttcaacgctttacatgcaaatctgcgagaaaacgctcaaaaacagaacagacaagggttttgctttggacaatccgacgacctttttgaagtctgccattgaagctgtcaatgaagatcttgaccttgttttagagaaggtcttgagtctcaagactgaaaaccaggatgataaagatgcgatcgagcaatgtaagttgcttgtcgaagacgcaaaggaggaaaccgtcgcgtcgctgaacaaaatcaacgtcacagaagtcaacagcttcgaaaaagtagttcctgacctggaaagttggctaagcgcggtcatgtcttatcaggagacatgccttgacgggtttgaagaagggaacttaaaatctgaagtgaagacgagcgtcaattcttctcaagttctgaccagcaattccctcgcgttgatcaaaacatttaccgagaatctctctccggtaatgaaggtcgtagaacgacatcttcttgatgacatcccgtcttgggtaagcaacgatgatagaagaatgttaagggctgttgatgtgaaggctttgaagccaaacgcaactgtggccaaagatggcagtggggatttcacaaccattaatgatgcgctgagagcaatgcctgagaaatatgagggaaggtaagtataccaaagcattttataacgtgaacgtggtaatcacgtcatcttaggtttaggtttaggtttcggtttaaaaactaagtaaatttgttgtattgaaattgtaggtacattatctacgtcaaacaaggcatttatgacgaatatgtgaccgttgataagaagaaggcgaatctcactatggtcggagatggatcacagaagacaattgtgaccggtaacaaaagccatgcaaagaaaatccgcacttttctcacggcaacgttcggtaaaacccctaattcttttggaaaatttgtcttgacaaaagttgaaaatatagaccaatagaattataggttaaactcctataaatcttgaaatctaaaaagctataatgaacatcattttatttttacttttttttgttaaaaatgaatgaatataacgtcaatgtgaataaaagctaaattattttttaaatgtttggtatccttaatagttgcacagggagaagggttcatggcacagtcaatggggttccggaacacggctgggccagagggacatcaagcagtcgcaatacgtgtccaatccgatcgatcaattttcctcaactgccgatttgaaggttaccaagacacattgtatgcttacacgcaccgtcaatactacagaagttgtgtgatagttggaacaatcgacttcatattcggagatgcagccgccatcttccagaactgtaacatcttcatcagaaaaggcttaccaggacaaaagaacacggtgaccgctcaaggtcgtgttgacaagtttcagacgactggtttcgtagtacacaattgtaaaatcgctgcaaatgaagaccttaagccagtaaaggaagagtacaagagctacctcgggcgaccgtggaagaactactctcgaacgatcataatggaatctaaaatcgagaatgtgattgaccctgttggatggttgagatggcaagagacggatttcgcgatagacacgttgtactacgcggagtacaataacaaaggatcaagtggagatacaacttcaagagttaaatggcctggatttaaggtcataaacaaggaggaggctttgaactatactgttggacccttcttacaaggagattggatcagtgcctcaggctctcccgttaagttgggtctttatgatgcttgatgacaacttgttgtttgcaaagaaagccatgtggatatagaacttcatccatggaaatttacttggaaaatcggatactagaacatagtgtgctaagagaatgtgttgtatcaaatttatatcgatttgtgctgaaaatatttttggaaggaagcatattataagtaatatgtaggatccaaatgtttttccttctttctccattgatctcaaatacgatgaaaatacacacacatgtatttccaaaagaacctagacatattgataaatgcatgtaatcttaaaagatccttgtattgacacacttgtcacatcattagaagttgtattgtcaatgcctacaactataacaataatgagtatggtcctttgatggagttccacaattgtagcaaaaagccaatccacacctacaaaaatgttaaaagataagagttttgtacataaaggaaacgaaaaagacggcgaagaagatacctgcacttcatgtataagcaaccctcagatttttcaatgtagaatttgcaagaaggacatcttctccacttcttactctctgccatattcttcaacaatatatcccctctttctctttcgttctcggctagcttttgaaactcctcgcatgttatctccggatgccacttagtcccacactctacactcaccattctatggcaatgaggacactccgatacattcatcttctcttcttcactctcgtccaagaagagcaaagcagagcaatccttataaggacaatagaatctctttgaactcataatcaccgcctcgcaaagagcgtctccccaccgatcaaagacttctcttggcaggatttgaccgcatttatcgggctcgagctgccccgagcaaccagaaacagggcatttgattgagagaatgttgtcttgtaacttagcagctatatattttgagacacaatcgttgcaataagtgtgagaacagccattgattcgaaaagattcaatccttggttttcgttcaacacatatctcgcagtcgaaagagcgtcttcgtcgttgtattggtcaaacagaggactgtcccttttctatggagattggtgtgaaacagaggattcttacatcgtcatcttcgtcgttgtattggccaagatctatgtagtttgtgaaaccggatttgaatggagtttgagaagagtgtattggccaagatcctcgacggagatggcgtcacgtttggttgaaccacgagcggagagaggtgtggagaagatgaaacggtcggagtcattgacggtggctgcattcatggaatctgtggccatttttctgattagggttttatgatttttctagttttttgcttgtcttgttgggttggttactgaagcgtctcatttttggtgatgctaaacctaaaacctaaggctgtcccaactcccaaaactgcttcgtgtttaatgggtaattaggaaataagaatgctatcatttcaaaatttggacgtaaaatcttttctaaattaagaatttgaactcaaggtaccaaaaacctaaacagacttgaagatacaaaatagattacgagagaatgactggagtagacaagagacaaatcaatgcttggatctcttaggagtttgtgcctcggcggcatccaaagaagcaacatccccaccctccttctccatcttctttctcgtaagtatcttattgatctggtgaagttcattattgagcttctggtcacggtcacggttctgcttccttgtctttcgaccatcttgcatctttaccccgaattggaacgccgcttttggcatcgcttccttctgctcattatatttttcccattcctcttctgtctcaaagtcccatcgatgtaaaccaccctttgcctgttccatgtacattcaacaaccagatactgtaattttgctcttccacaataaataacaaggaacatgtaattaagtcagggcatacctttccacccatgtccattttagacaaatcaggttcttcatcactaccgacaatctcatggttgtactcttggtaacctggataacactctgaataactctcggatacaaaagttggatctttctcccttgcgtcactctccctcaactgttgaagcctttggtcatcacgcttgaaaaccgatcccaaacccctatctttctcttcctgcgacatgagttgaggatctagtaaaacatcggtttctggttggacctcgtaaccctccattccaggttgaaggtactgctcctgatacccagtttgctctgcatattggtattcctgccactctccggggtacccaggagccagtccttgagtttgcattgcaccatatgcactctggaaaaacacacaaccaccagaaaaaacctaaatatgggaataaatgacatctaataactacataccaagacgcaaaatttgcagacgaggatcaagatttgagaataaatacaaccaaggattagctagggtgaactgaccatatcttgccattcctgaccagcagatggctgcactggaccataagcaggctcagcgaaataaggtaccttctcctgcactggaccataagcaggctcatcgaaataagatactttctccttatccctgggagattcttccatgtcctcagaaataggactctgtgtcacatctttaccaggaaccgtgtaatcgacgccttcaccaacaaatatgtcatcatcgtctgtcctggcaacagggggttcttcttgtttcgtactcaaatccagatggtttatcccaggtggtaatggcggaggaggaggtaaaacttccctgtcacttatgttcacagaagatccattctcaatcttagatttattgtcgtcttcatcataatcattagcaatagttgacatctttcctgcatttgaaaagttgcagtggatgtgattaataaggcaaaataatataaaaaatgcatgaacgtatgatagaatagaaattagcaaattatcttgctaaagaatcagaaaccagccaacttgtatccaattgtatgctgatgtgaaacaagaactacaacatgtactggcaccacattagcataataaaaattactaacaacagagtttacagaaccatcaagggacggcagcaacatatttatgatacaactaaatttcttcacaattgataagcgagaacacaaccagacatcagtagatactactagtactgtggtcaaagactaggtacactctttacattcttggctccaaactgtaagaccagataattaacaaatttcgggaaaagcagagaacttatttaaccagtgtaagtgaatcaggtctgctaatacttaaactttacaaaaaaatgcaccagtagatgcaaaatacctttcccatctttttctttctttttcttcttgagaactttccccgacgacccaaggcgaagatatgacatgattttagcaattcgatctagcacagaaccatcaacattgactgtgacaaattcctgttggggagataggacagagaaacagtgcctgttaaatgaaacaattctcgcaaaaattgcagcagtgatttcaattataaatttttattatgttcagtaaacaaacatattaagcaacgttaattttggttccagattagtagaaagaaagttgaatttagtttaaaaagatttttataattacttaaagaaaatctatgcttctaccaaaactaatgacttatataatcgatattagctgtattgaatacatcaacactgtaaaagaaaataggttgcagagacaggcagagtgggcttattttcattagaatcaaaacgatcatgtcacatcactgcttacagtctaaagatttttccaggatcaagaagactattacaacaaggactctaagtatacatacctcgggcaccgggcagtcagctttactcctatataacgtggtcggtatgtcatgggtatagccaccttcctgaaaagcaacaaatagaattaaaaacaaaagggaataaaattaatatacatcaacagggaggctttcaaagggcagactaaacccatactataagcttagcctagcagcttagctgagactaagtatctcaaaggaaacttcatacgtaacactaccaaatatcaatagtatattcaactgacttttcttgtcgtatggtgtctctatctgcaagagaaaaagaatatgcttcttcaagaagagcagacacgttaatcgaactaaaaaacctttacaaccaattctgcgtataaggtttctaacaaatagattaaatcgtgaataaatcgctaacaaggtaatgcaaaacagcttaagctaccttcttaaaattttcctgagacatgtatttaaactagaagcgaagatttaactaaatattaactaatactcgaagaagaatcgttgaagcagaatacacatgtatgactacttcctaagacaaacaacgacataagaacatgtaataagattgaatcttcctgaaaaagagttaacaagcaataccatatcatagacaaatgtcattctaccgggaagaaacatctcattagacttgatgatagtctgaggcttaacaatccactggtaaactgactgaaacagatcaaagacaagagaaacaaaaaacatcaagcgcgttaactacatcccaaaacttgctcctcatctgcaaagttcagaacaaaattgcatacctttgcagctatggtacggaaagtaactcgctgatcttccttaggcgcactgttaatatagtaaaattagcacttgaatcaaagaagccaaatgagtcaataaaccaagtataaccaaatctacctagtcttcccaccatcaccatcttcaccatcaggtttcttaacgatttcgcttcgtactttattcaacaaagcataatccaaacccttaactaaatgggtatgttcaacatcacctaaaccatatcataaaaacaacataagcacctcaaaaaaaaaacattttgaataaatttgtaaacctaacacaaacctccaagatatttgctgttctcaatagatatcttaagtgcatcagcagcactacaacaaaaaaaagtacacagcaacagaaatttagagaaacccaattagaatttagaaagataatgaagtaatcgaggaaagacaagtgctaccggatatcgacagctccgggaggagcaacggcatggaaagaactaagctctgatggatcataatcaggattttgattctctcttctttctttagcacgatctctgtattttggattatcggattcctctagtttctcctctctgtgaaggaaaagtgacgagttttgatgtttttgtgtaaaaaccctagcttttgaagaaaaggggagagaggaaaatgaagatttctgacctccgacgagcggttttctccttgtgatgcgattttgaaggtttcattagatttcgttaattcgatttcttgtcgtgaaacagagaaaaatcagattttggctgaagttcttcgttctgatgatatctgtgtctgtttcgatttcaaagcgttggtggttctggtcaggggaaattagaattcgatgtttaatttagaaaccggatctaatttaaaccgataaaatcgtttagcgaccgggtttgattatcgaaacctggttcacaaatttttaccatccaccaaggacattaaaaacccaattcattcataataatattaccttagatcaaagatcaaacactacacatacaatacaagcaacattcccaaaacgatggtcttatctaacattatctacaacaaaagtaggccaacatggtcctcatagatgttatgtagactcaaaactatttctcatcgaaaaagaaatgtaatgtagactgcgtctccttagatttcttgatgttagatttccccattccatgcatctttccttgtttcccactgcttttaacattttgcaacctctcatagtgtttctgtggcttttcttgagctgagaatacctcatagtctcgctttgtcccactcttttcgctaaacactaagccaccttccttcgtcgtcgggctagttaaaactgtcttctggttttcatttcctggaatatcttcgacagcctcatgcagctgattcaatctctcatctgcagtaaagaaatgatggctttgagtctcgggttcttcttttgagattctttggagatcaaggatgtaggactcagccggtatactggcactgctctcacctgtttctttagtaagaccagtctttagggatttgccttcttcctttgtaccctcctgaacatcattctttacaggttcaggaagtgacgcaactgctgagttatcttcaacaaatggttctgctttcacaatctcttgaaactccagatttttggctacattcgacatatctttctccccgtctagttcttcaattttcttaatgctgtcagaaaacgtgtccttttcagccgtaggttcctttttcaaatcaactatgatatttgcatctgttgatttggtttctttgtctccttcatctgttttgggctgctttgttgagaaaaacttcgagatcaagctattttgtgaagtctttagcggtatctgcaggtggcataatccttatttgaaatgacaataagcatacagactgtacaaatacatagtgatcctgacaatatgtttaatgcgacttgagatcaaacttgagatttgagttgtacactactaagaaagggaaagatgttaaccgtacctgttgaatacactctggtccatcaaacgttggtttaccaattgcagaggttactggataccatacctgaaagttcaaacttcaatctcaagtaaatgaaaaaggaaagaccactcttatatgcgaggaagtaagcaattgcataccaaatccgatttttcatatggtgaaagtaatggctgcagtttcgttgtcgagggatcatctaaccatgtgtcgattgaatccttatcaccaagaattacaggcattctgtcttacatgaaaaataaacaaactcacgtgttaacacaaaaattcagggctgctgcaaatcaacaaaacaatcatcaacagccgctaataatgtaagcattgtataagaaacgctactctcaatattaaactaccttaaacagccactgcttgttctattccagtacttaaagaagttaaagattctcatgcaattacatatgtatcttttctaaaagagcttatcaaatcagatgtaatacgaaaacagaaacaactcatactactatgataagtttgtatctttattaatgtgcgggtttgattaaacctcattttaaacaacgaggaacacaagcttcaagcgtccatagacaaatatacaattcccaacttcatatgctatgtgtttcattgtgctactgagaatcattactgaataagaaaaaatgtcacacgatgtagccagtgtatatattactaaccatggagccattggagggctgaagaggaagcggttgtcaaaatcgtaaaggtgtaaagtgtctcacctgcaagaaaaaaaaagtaactgttacttaaattgaaaacaggcgagatattgtagctaccaaaaaggacataaaaccaaagacttaaattcattcagcaagttttgcttcaattttctaatacacgttaaaacttcctacctaaatatatggaggttaaaagtgatgagaaagaaagatagtaagcaattcaaacatctcttaaaaggaaggctaggaaatgtttcaggatcggcttcaataagaatatagacactcagagcttaatataacgaagataaacggttcacctcctgagttctgccaagtatcaaaaagagcagcaaatacgagaggtctcccatcctcaaaatggatgtagtagggttgcttttttgaaccttccttcttccactcatagaaccttcaaaacgaatcacactgtaagttttttcgcgtagacacaacacaagcatgtatatttatatgtataaagaaaaatttcacatctgtgtaacatgaaaaattaaaatatctagctgaaagtttgtatgagttttttgatccaacactatacattgataaacaatacgtattgtaatgcagatggaagataaaatggaagcaaacatttacaaacaatctgatccttgagattgtttagatagagccaaaagagtaaccatgaattgagtggaaagagtaacattgctgatcagaatttaaaacatctctgccactaaactgggattcatacacagattgaacataaattagaacacttaaaaacgagatgagatcatagatatacccatcaactgcaacaaggcacctattcttgggaagcaatcgacgaaaagacgctttctcagccacagattcagaccgagcattaaactacagaaatatatataaacaaaaaggatattcagttcttcactatataatagcctcacgtcaacaaaaacagattcaataaacttgtaataagtcccaaatcagaaatagtaaacttataccattttgaagaaatcaggcttatcagttttcttagtgaaacttggcactaatccccacttcatacaatgaacaacaacaccatcaccaacaacttcttcattgtctctccgtagaacaggtatataggatccaggggcaacattgtaagatggacgataactgatttgacaacagaaaggaacagttttagactttgcaaaggttaaaaattggaacttgaaattgattaaagagaaaagagaaataaaccggtcgaggtgaagaaatcgggtaggaacggtgtggcggtgagaagctctggggacatcgtcgggtcttaaagtacatcgagtcctaccgcacatctttactgcttttggtctggacaagtaaaaccctaataagaccgctcaaagtgaaatacgaaggatttggtttgtacggtagtactcgccagagggaagacaacagttctctttcactccggttctgtataaataaatggtcaaccgaaccatagtccttgccttgactagaaaagtaattaaaataaatattccagtggaaacagtttagttttttttttttttcgagtgttttagtttaagttaagaagactagttttttttttttttttaagctccgacgaacaaaaccactgcgaaggcaaaattgaacaaaccccctaagacacaaaacgatcgtctcttgcatgtgatctagaggagaaaggatcttcgatggtgtcttcttccaaaaccgagacggtggtaggagctccgcttaggtagactagttaaaatgaatttttcgatagaatccattttgatttaagatatgtctaatttatgtcatggtttgtttgtttcaatgttcatgtttatgtgtgtgtttttaataatttccgcggttttagtgttgatgtttttcttcggtttgtttcgttggatctttgatttataaaaagaatcaaagaaacataagtcaagtaatgagatttttaggtgatgaattgtgtatcccttgataacaatttattttactcttcataatatacataaaattttcacatttttttagagtcactatatacaactaaaatgttaaaattataactagaaaaaacgtaaataatctgctaaatcagctgtttaatattttataattgtttggcggaaatctttatcaaattcagttctttttgctcgtaattatgtagttattcgttatgtgacaaataaaatgatacaaataattttaaaatcaaattagatgacaatatcttcggatccaaaatagatgatttcatcgtgaacctgaatatcttttttttgtctaaagaacctgaatatcttactcatctttttatcaaagaaaacgtaaaccacacgatcagattaaactatataattatgttaacattttctttttcaacatttttttataaacttcaattaagtcatatactcacaaatgaccttgtgtaaatcatctcaaagaaaaattaaaatttcaatgtgtgtttaaatatatatcacataaacgtactagctatgttgttgctagtgatttgtagtatgttgttgctagtgatttgtagctatgttgttgctagtgatttgtagctatgttgttgcgtcaacataaatccatatagtggctggttaacaaaagaaacctcgttttcaaatttattagatcacatttatttatttagaatattctgttctgtggatggagtatatagtcaactttatagattcaaaaaacaataatatataattgtaatgtcttgtttccacgaagttactcgatctaccaaatcaacaagcaaatcatttttgtcttctcaaaaaagacaatcaaacttcaggattttgtcttcattaaagaaataatcatatttgtctatataagtaaacaatcaaactcgagaataaggtagagacaaaataaagaagtaccatggcagagattcgccagagaagagtgttgatggtcccagcaccgttccaaggccatttaccttcgatgatgaatctagcgtcctacctttcttcccaaggcttttcaatcacaatcgttagaaacgaattcaatttcaaagatatctcccataatttccctggtataaaattcttcaccatcaaggacggcttgtcagaatctgacgtgaagtctctgggtctccttgaatttgtcctggagcttaactctgtctgtgaacccctattgaaagagtttctaaccaaccatgatgatgttgttgactttatcatttatgatgaatttgtttacttccctcgacgtgttgcggaagatatgaatctgccaaagatggtctttagcccttcttccgccgctacctcgatcagccggtgtgtgcttatggagaaccaatcaaatgggttacttcctccacaaggtaccatgcttactttttttacttgggtttttttcaactagcaaattttgatgtatttaatttattgtttaacttttataaactactatgttagtttattaatttagaataaggttttggttaaatatacaagttaaagaaatattattcttgtaaggatcaattttgtagcattggcagtagactctgtttttttcaacatttaaaacgttttactgtattttggtgatttgggtctatttctatgacagacgcaagatctcaactagaagaaacggtgccagagtttcatccctttcgtttcaaagatctgccttttacagcttatggatctatggagagattaatgatactttacgagaatgtaagcaatagagcctcatcttctggcataatacacaactcttcggattgcttagagaactcattcataacaactgcacaagagaaatggggagttccggtatacccggttggtccactccatatgaccaattccgcaatgtcatgtccaagtttatttgaagaagaaagaaactgtcttgaatggcttgagaagcaagaaacaagctcagtgatctacataagcatggggagcttggcgatgacacaagatatagaggctgtggagatggccatgggatttgtccagagtaatcaacccttcttgtgggtgatccgaccaggctctataaacggacaagaatctttagacttcttaccggaacagttcaaccaaacggtgaccgatggaagaggttttgttgtgaaatgggccccacaaaaagaggtattaaggcatagagcagtgggagggttttggaaccatggtggatggaactcgtgcttggagagcataagcagtggtgtaccaatgatttgtaggccgtattctggtgatcagagggtgaatactcgacttatgtcacatgtttggcaaaccgcgtatgagatcgaaggtgaattggaaagaggagctgttgagatggccgtgaggaggctcattgtggatcaagaaggtcaggagatgagaatgagagccaccatattgaaggaagaggttgaagcctctgtcacaaccgaaggctcttctcacaattctttaaacaatttggtccatgcaataatgatgcaaattgacgaacaatgataagtggtaaatttggtgagaacgaaattacgtgtgtggtgttttaatttttaaataaaaatatgtgtttgaagtaatagcggtttttgatgaataaattttacattcatccaaaaaaatacagcaattttgtattgttcttaagttcttaatggttgaagctaattttaggatacaatgatattttcattggtgttaataacaagccagtttttgacatgtgccaagtgtgtatttgcgtacgtaggatccaatcttctttgcaattttatttgtagctattaaggaatatttgtaaataatttatagtttttataaaataaacatgtaagagcatactcactaaacaattcttgatcggtatctttactatatattagtaaataaaatttaagacattatctttccagtgtctaaaatgtcttcctaaagacacaaatgtaatgctaaaagacacttcccattttttaatagggaaaaatgtcaaaaaaagcgcgaactttaaaatttgggacgataaaagcatgaactttcgaaatgtcatttaaatcataaaatttcatttgactttttaaaaaaattgtcaagtttcgttgacttgaccattttgggcacgtcgttaaatttccgttaacagcattaactttctgttacaaatttctgttaaatcgaaacgacgtcgtttttagatctccaaaacgacgtcgtttcattagaaaataatgatgcaaaatccgcgtccgcaatggctcgaacatatgacctattggattcatatagggcaatataccgctgagctacgacaataatttacaataataacaaacattgcatacatatactaaccaatataatatactattaattaaaaatatatgcaattaattaaaaataacaaaattaaaaaatatatattaaataaacttaccataatatattttaaatttcaaatatttaattatatatataaagacatcttctatatttgaaaaattatagatctctctagaattcacataagtctttgcaattgtatttttggaatagataaaaactgaaaaactgaaaattgaaaataatttgcataagtcttttctattgtattttctaaatttggaatacttaaaaattgaaaactaaaaataatttctcaaatataaaaaacatctatatagaaatttaatatttcaaatttcaaaatatatatgtatggtaggtatatttaaaaactttgtatatatttgtttttttgtagttttgtaatatataatttattgtatatattttaaattaattgtatagttttatttgttagtatatatatgctatgttttttttttatcaaactgttctcgtagctcagcggtagattgtcctttaggagtccaataggtcagatgttcgattccatgtgaatgcggatttagcatcattattttctaacgaaacgacgtcgttttggaagctccaaaacgtccaaaacgacgtcgtttcgatttaacagaaatttctaacagaaggttaaccccgttaacggaaatttaacgacgtgcccaaaatgaccaagtcaacgaaacttgacaatttttttaaaaagtcaaacgaaactttgtgatttaaatgacaattcgaaagttcatgtttttttcgtcccaaatttgaaagttcgcgcattttttgacatttttccctttttttatcatattttttattagttttttatttaaagacacccacacataatgatcaatgtggatgctcttacatgcctacaaaacaaacctattttatagttcttctttgggttttcaaatgttcttataatagagattgtgtatagattgagcattatcgatccaaatatataaaaagagaaagaaaaaaatatatatgatttatacccattcattgttttataatgatcggtagacgttgaaaacccaaaaatgataaaattagtagtagctaattgagttctagaaataaggtttgtaaacctcattagtttttttgacatgggatacgacttaagactactaattattaattgttctatttctgttgacacttattttaagaggaaatcgaccctgtttctatttttagggaagaaataaatagtaaaagattgctaggagttagaatattaattttgtaagatgttagatgtgaagtaacaaaagaatgccaaatatagattaagttgacggacacggtggtgaaccaatgaattttcacatcaataatcaaaaaaaggtttaaccaatcattcatctatttgcttcctgccacaactatatttgcatcaccccattgttcttaagctaaaaccaaacccctttcaatctcaaatctaattttaaatctaccttttcttttgtttttttctctcctcacaaattactcaatttatagttgttaattttttgaggagaacaagaaggtggtagtattatttcaaaatgtttacggaagctgatagcattcctagggcaaaatatgccaacatgatgcattctgatccgaatctttcctccacgatgacccaacaaacagaggaagagtacggtatacgcaatagcagtgcatctgcggttggcacggggatgtatgatagaatgagttgcgaaggttctccaatgatgatgtctccttggaaccaagcaactccatttactcaaacacaatggtctactgtagaagaaaacctaccccaaaatggccttattggctcgcttgtccgtgaagaaggtcacatctattcattagcggccacaaaagatcttctttatactggctctgatagcaaaaacatacgtgtgtggaagaatctaaaggagttcagtgcattcaaatgtaacagtggattggttaaggccattgtgatttcaggggagaagattttcacaggtcaccaagacggaaagattcgagtttggaaagtctcccctaagaaccagagcttgcacaaacgttctggaacattaccaactttgaaagatatattcaaggcatctctcaaaccaagaaactatgttgaggtgaagaaacaccgcactgctctctggatcaaacacgccgatgctgtttcatgtttaagcctaaatgatgagcaagggttgttgtattctgcttcatgggaccggaccattaaggtgtggaggattgctgattcaaaatgtctagaatcaatcccagctcatgatgatgctgtaaactcggtggtatcaacaacggaagcgattgttttctctggatcagccgatgggacagtcaaggcatggaagagagaccaacaaggaaaatacacaaagcatacactaatgcaaacattaacaaagcaagaaagcgcagtcacagctttggctgtaagcaagaatggtgcggcagtgtactttggttcgagtgatggtttggtcaatttttgggagagggagaaacagttgaactacggtggtattctcaagggccacaagcttgctgttctttgcctagaagtggcagggagtcttgtttttagcggatctgctgataagacaatatgtgtgtggaagagagatggaaatattcatacatgcctctctgtactaacaggtcacacaggtcctgtgaaatgtttggcagtagaagcagaccgtgaagcctccgaacgtcgggacaaaaaatggattgtatatagtggaagcttggataagtcagtaaaagtatggggagtttcagaatctttcattgacatgaaccagatgagtatgatgcaacagcaacaacagcaacatgttatatcacattctgaaccattcatgtctgatggcagtttctcttcatcagctggtggagctagcagccatcgaagacactaatcatggtttgtgatttgaccatcaaataccaactgtgtctgaattattcatttgtttgttgttaaatttgaatggaaagaaaaagaaagaaaaatctagttatgatgcagtgttgtacaatatggaggtgagtttgaactaattttttctttttcttttttatcataaaggtttgttgtaatttttttatattttgtgatgaaaacctgtaactctatcaaacttcataataattaattttgttgtaaacttagataggagttcatgcatttcataagcgttttcttcaaatttttactgtggttaattcaaaaacaaataatcactcaagttatattctttcaaaaaaataaaaattagtagaatatttaaataaaaattttgtttacgtgtcttttattatattacagtatattttaaagtataattataaaattaagcggcatcaataaacacaaattttaattttttttttaatatttacttgtcgaatgcacattaaattaaaattaaaatgattcatattcatatgtctatatatataacttataacaaattatatatatatgttaacatagataattattaataaattttctctcataatttatttagaaaaagaaaaaagaatagaaattgagtaaagcgatgagaaacgtgtgttcagagatatttgataaaaagaagtaaatccatctctggccgtaattggctgtggcagccacaccctccttatccaaaatctcctccttccttaaaaacaatcttctcttcttttgcttctcctttctttgagtcgcttcacttctcttgcatccttcaaactcatccacaggtaataatattaatcaaccaatcaataatctctcttccaacttctcttccgatcataaccatttcttgaatctgtgaatcttgttttctttttcagcaaggaatggcgacagcagcagcaccagcagtgatttcatggacaagatcaggcattgtgtccaaatccggacaaacccagaagaaatctgagatgaaagtttcttacataactggacttaactcatatggtggtctcaaggcacagaacaacaaggttgtctcaatgggatcaccactctgcacagaacagtgttttgctaacgttgtgatgtctctcaaaggaagaagaggtaatggaggagccttatccaccacgtgtaacgctgtcggagagattttcaagattgcagcaatcatgaacgctcttactcttgttggtgttgcagttggattcgttcttcttcgaatcgaaacttctgttgaagaagctgaagcagagtaaatagagtaaattgctgctcttataattatatatttttggttattgttgttgtcaagctttggtaaaacttgatggatacatgttacatttgtttatgaagaagctcttttcttggtagatgaaaaaattgggaatcctcactaatcagtaactctgcatctactgttttatccatgccctccattgcttcatatatctcttcatataatttttttgtgaaacttgctttagtgttgagaaaatgaacgagattgctttttataatctactccttttcctttggacatcataggtgtttacattgattttattaggtgagaataatcttggtttgtgaggtagccattccggtaaagtgtttacatgagataattaaaaatcattgctgttgcatttttaatgaaactcttagcacgaacattattacagttagaatactaatcgttagttgagtaatatgagggagcatccaggatcaaaagcatcttgattgagtccaaaaaagttgactcgaaaaaacacaaactggatgatgtcattaacaaaatccctcataaagtactactagaaaacttagcaactttttcagactaacgggcgagtaaagtgataaactctgactggccacaaccgtaagcggctagcttgtaatcaagacagactatgaggactcgcatatatgcatcactctagaacgcatccttctttggttgatatgaaatgattcaagcagtggagataacattaaatgtgcatcaacactctcattcaatgctatcgagaagcatcattgcgcttttccattgattctagtaaaatagtacccatgcctcttttttggtaactcttctcacttacggtcagagagatcacattatcaagtctcaccaatcccgtctaattaaagttgtaaataatactcattccgttcctttaatttagagggcagaagcaagagaaaattttagggcctttacttaaactatttttcctatgagaataaattttagaatcttgcaaaaatatggacttatttgtataatgatgtttaatttgtaggagctaaaattagcaaacactacgtaaagacaattgaaatcgatatcataaacgtttaaggaaagacaagagaggagtcgagctgatgaactctttctttaaccctttgaatcactcgtagtgtgacggtttttgtgtgattcaaggatcccatgatacaacctctataaactgatgtcgcaccactcgaaaacagctctaacgaaccaagtttctacgatcctctcaaatacttactttcttaacaaagagagattgttggatatatgtgtttctatatgaacggtgaaattctcaatatgttaagaagaagacatcaaacatgcatatatagaggtttgagattggtttgattcttaagatcaatcaaccacaaccatcgcaaatccaggagaggtggatgataggatgaggcaactatctcacagtgaaaccgagtctcaaagagacgtgaaacaaaaaagactgattctcatggaagtattcaactcgacccaacacacttttggaggtccaatgatagtaaagccaaatcattgtgacccacttctcattcgcacaatttaattttataaagcccacttaactttaaaataaaatttggtccaacataattgagccttacaaaattgtggtctaaaaccatgtttcatctagctagtggctaggcttagaggcaaccctgataatacttgatctaagatccactaacacgatattccaactttgaaatgtatgcacatcattagatgctatatgaccaagaaagatatatttgacagagaaatttgcttagatttgtctaattaattatcttcgctcgagactaaggcaaaacagtccaccaacggtaagcctaataagtcaatgcatttgtttttttctaagacgtcaatgcatttcgttctttttttccattgtcccaaaatactcatccttttatattagaagaatttgtagccaaattttcgtttttaagtgatgttataaattttacattctacaaggttaattgttattctttattgttactgtaaatattgatgcattttattgttattttaatattatgataactttctaaaattttgtatgcataattatgtataaacatcatctaagcgacataagaaaataattttttcgatcttgttatttacagaaaaataaagaaaacaaattgtacaaaactcaaggcacgagtcctaatcttatatttggagatactataggtcacttcgtaggtggtgtttcgagatcaagttagccattgaagaagtcataattgtcatcaaagcagtaaacaaacgtaaaatgaggataaacaattgatgaaatcatagaaaaatcacacataatacggatattgtattattcaaacgtagttggattgtactgattttgagtataataacatcgaatatagattcaattattgagatgcgtattgctttattatcataaattaataaggttctgccattctggtcagttctagttggtggctttaacttgaatgtacaacagcctaagatttaatacggtaacaaaaagaagtgtacttgtacctgacccaaattagcaagaaaagatttgtagtatgatttattttgatggaaccttgaaccttcgaataagtaattaaagtgaaaagctctattacgtatgggtcaattcatgttaacatctcaaataaaattttaattagtgatttttttcctaatatcttgcggattgatgtcaaaatggctttcgagtttattttttaaaatatatttattcctaattccaaatttaagaacatgaaatcaattcaaatgaggttgtacacttcaaaattcgtaataacatcactagacggaaaaagagtgataactgataagaaaacaacatataataagggatgataaaggacaacaacacgatgacaaaaataaacttcattattccaattaataatgaagtacatttccaaataaacaattactaaaacttatacctaacggagaattaatactttattcttgaagtttgaacaaaaataaatatactttatttactcaaatagtagataaataaaaatcctctgttccttccttctcccacaaatcaaacaagtgactttttatatttatcttattaattctgtagtctcgagattcgctttttctcctgcttacttctttttatcatcttctctttgtcggtttgatttggaaaaactttctgcaaaaaaaagagagattcttaaactttttatctcaagatcctttcaaaaaatctgaaaagagaagatttttaataaaaaagaatggttgaaactggtcaccatcatcaacatccaccggcaccggctgcagccggtcatccgccggttccatccatggcgatggcgcgtaacatgggaaccacttggcctccggcggagcaacttcatcatcttcaatattgcatccactctaacccttcttggcgttagtctctctctttctgcttatactactttctttatttttgtttcagatgtaaaaaataaaaattataatcttttcagtcaaaagttgtattagttcagttctgtctctctctctctttatctgctttatgttgtgtcttaatttgtttaccaaaagattagtttagatctcagtatctgattcgattctttatatttttcctctgtgttgactatattttagcttgtgttggggactaattagctttaaatctaatgataaatgttgtataattgttcttgagacacactaattgattaagattaaaataaactgtttcgttattacttgtttatgtagttggtgaatccaaaatgctataagaattgaatccttagcagttaaaagtgtggggttgggtttatgctaacactggtcatggaaaatgaaatgcaattagtgttttaccattacaagaaatgccatttttaagggattttgtaacaaaaggattgtattattgtttccttttaagaattgatttgtctcatttccattaacaatgaatcattttacagatgagacggttgtactggctttccagcattacatcgttatgctcgggactactgttttgattgccaacacactagtgtcaccaatgggtggagatcctgtatgtgatgtttttggtttttggatccggttgtctaatatttatgttattatatgattctgaaatcgaccgtttggtattttgaacgataatagggtgataaagcgcgggttatccagactatattgtttatgtcgggcataaacacgttgctacaaacgcttatcgggacaaggcttcccacggttatgggagtatcgttcgcgtatgttcttcccgtattgtctataatcagagattacaacaatggtcaattcgattccgagaaacaggttaaagctcgttttatacttgcgcggtacggttgctatatatatatttttttttttacttgacaaatgccattttccttgtagagattccgacatactatgagaacggtacaaggatcattaatcatttcttcattcgtcaacatcataatcggatatggtcaggcatgggggaacttaataaggtaatataaaagatcaatatataacattactagtttagaagctgatggaagttttaacatttaatgattatggtttctttaatgcagaatctttagtcccatcattgttgtgcccgttgtttctgttgtgagccttggcctattccttagaggcttcccactggtaacaatttcaactaaagtattcagctttaacaaattttaactccttcactaagtcattatgtgatctcttcggattttaacagcttgcaaactgtgtggaaatcggtctaccaatgctgattctgttgatcatcacacagcaagtcgggctttttattattttccgcgctatatatggtggtgattgtttagatatgtaatattaaatcttgctactgttcatcttgcagtatcttaaacatgcattctcaaggatttctatgattcttgaaagatatgctttacttgtttgcctggctatcatatgggcttttgctgctatccttactgtttctggtgcttataataatgtttctaccgcaacaaaacaaagttgtcgaactgatcgtgcctttcttatgtcatcagctccctggtaggttgattactatttgacttgattcttcttttcttctaaggtctaaatatctttatactcagtcactcaaactcatctttcaggattagaatcccatatccattccagtgggggactccgatattcaaagcgagtcatgtttttggaatgtttggtgctgcaattgtcgcatctgcagaggttgttattcatcatattagtttctagcttatgttaaatattcttcatgttacatgctacaacttgttcttatgttatgtatatccttattttctttagtctaccggagtatttttcgctgcatctagactagcaggagcaacagcgcctccagcacatgtcgtctctcgtagtatcggtctacaggttttatttccagacactaagaaagttttttttaatcttttcgttttctgttctctctgctaatgttccgaataagtctataagctgttatattttcctttaagggtattggtgtgctccttgaaggaatatttggttccattactggcaataccgcgtccgtgtaagttctaaatatctcttgctatatgtgctactatcctttcagaatttatacaaagaaactaggtatataattcatcttgatgatatatacagggaaaatgtcggtctccttggcctcacacgaatagggagtagacgagtggtgcaggtttcaacgtttttcatgatatttttctccatatttggtttgtctttcaaccctctaatcagtcatcttgactaagtatagaaagtagccgttcatgggttttaaatccgcgtgttttcaatgatcttcaggaaaatttggcgcgttctttgcgtctattccgcttccaatctttgcaggcgtatactgtatactacttggaatcgttggtgagtagcattttgtatatgaacctacactacctgatttcttgtaaaagccggggctgcttatgatacttttgttatgtgattggcccagttgctgttggaatatcgtttatacagtttaccgacactaattcgatgagaaacatgtacgtcattggtgtctctctcttcttaagtctttccatcgctcagtactttcttgccaacacttcaagagcaggatatggaccagttaggacagcaggaggatgggtaagcctttcaaagaaccattgtttgaaacaccattttacggtagtatagggagtgatataatatttctactatatagtgtttctttttcttaaatgtgatgtcgcggtgaattgtggtgcagttcaacgatatacttaatacgatatttgcttcggctccgttggtggcgaccattcttgcgaccatactagataacacgttggaagcaagacatgcaagtgacgacgcaagaggaatcccgtggtggaagcccttccagcacaggaacggagacggcaggaacgatgagttctatagtatgccccttagaatcaacgagttaatgccgacacggttcctttgaagactgcccctgaacgtttcttctgtatttggaaatgtaagatatgattatgtgcataccttgtagcttcattggggaaaaattgagtccagtggatacaaatgaacataggcctttgatggaaaaagctatttttttgcaaactatataacttgtgttactagattactttgcctttcatatcattagcataccttttgaacaagtgctttataccacatatacaaacaatttttgttctttcattgtttcttagagcagctccaatgcaaggttctctcactatatttgtggagttctctgattttttgataaaaaaaataaatgaaaactaaactaaaagaagagaatcgattctctgtagagagtttatggaggctgagagagcctcacacgtggcaagctatgattggtagaaatttataacagaacatagaaaaataaaaatggacgctggagagtttttttctttctctccgtcaaatctatttctcttcttcgcgatacagttgctctgaggcgaaatgcaaattccggtggagtcgagtctccgacatatctgtttgggtcgctatagcaccgtcgaatgaacgaaggagaatcgatggaggagtaaaatctttccgatttggagtgaagtcgatcaaggaagctccaaaatctttccaaggtatgaatcaagccatttctgaatttagtcttagattgtttggaggctctctgaagcattgattttatgagctatctgtttgtgttattctgtatctaagtatacaagcacatgcatgacaatcacaatccattagacattaagaacttttattctgttagtgagttactcgacaaaagattgtgcagaatatccgcaaagctgtggcaatgttgaagaacattgttgtacaattggagacaaataaaaggtactatgtgttatttcatagacttagctgacttgggaggtttgatttgtgaggcgtatatttgcaatggaatgcactaaagattaaagaagatgatgtaagggccataaaatagcagaacatgacaaatactaacttgaatcggaagtgttgctttgttattaggctaagttactgcaaaagaacaaaacaataacatgtgaaatgaaagtgctttagtactgctcttaagtccgatgatgtctacctcaagcttctcgccaaggaaacctaaaggactgctcctaatctttttatgcttttatttctctgtttgttacattggtttactgagatttggtcacttgaattaaagacttagattaagactcttgttatatatggtgtggatgctaggaaaagtgagcagctgaaaagagtggcttcactacaagtaagaaaggcttaaccttgaaaagaagcttctgcagcaaaggcttatcacagagcagtacaccccacatagatgtatcaaaggctgctaattaaaggatgttggtgttgttctcttgtatgatcctaaactttaggttatgaagaatagagttattttattgtaatacagattatgtatgttgtgaaaaaaaaaatacagattatgtatgttttgtgtcatgaatgtttttgataatttatgcaataaaaagaagttatatattaattcaattaaattaattgaaataaattaatttttattattacttttttcccagagaatcccatgaagagatactaccattggagttcactaaaaatcctaaaacaatactaaaactctcatctcaaaaaaatgaaaattttattcttaaaaaattgagagaacccatgttgggtatctcaccattggagatagccttagtctctgattatttttacggatagtcttttctctagcatctaaagaaaaagttattaaatatatgacaccagaataggagaaactaagtaacacgctactcatgtctattgggcaatgaccagtttaaccttcttttgtgggtaatggtgatgataattggtttatttagaaaagaacgcaaattagtaataacatatctttctaaacataataacatatcttattatcaaaatcatataataatagctccaaaacctagctccaataagataataaataattaaatatatataactaatttttaatagcaatatcagtaataataaactttatagcaatttaaaaaaaaattgatgtgggtcgtagtcccaaaaggttgtatatattttctttcacaaaagaagaaaatgttttttatgaagctaccctaaacgaaggtatccaaccaacaaatttgctagagtagaagtcacgcgccacaggagagagtagggaaggaagcaaacacaagtaagcttagtggatgccacttaacacaaatgacaacgttgttttccaatttccatgtttacgctatagcttcagacagtacctgaaaaagttagttcgcccaaagaccaaaactaaacaaaaataaccaaaaagttactctcattttatttattaaattacggtaaaatatcgatatccttaattactaagattttgattttgaaatagtgttgtcgttctcggtccaaatttcaaattttgacctgaagtctcttgtttttctgatagattctctagttcttgtcctttttaacagacgcttaggcctctctcttgcaggttaatgcactgtcttcaccattttcattttttgaaaaactttcctcctaaaataaaataaaatatattaatattaaatattttctcaaaattcatttaaaaggcaaatttgagatccttcttcttcacattaacttcagtgtctcttcttcttcttctgttaacaatggcgtcaatgccattgtactggcaaccaccaccagctacagaggtttcacaagactcatcctccgtctcctccgctggaaattccaccattggtccttttatcgccgtctttatcgttgtcaccgttctttgtgttctcgctagtgttattggacggctttgctccggcaaaaccatcttagggtatggagattacgatatggagagatgggctgagagtagatgtggttcttgtatcgacggtcacattcatcctcaccggccgtctccgtcgcctacgcctccacctcgtcagcctttgcaccacacttcctccggcgtctccgctgaatctgaaggacacgtggcagatctagatcatgagactgatggagagaaacaagactctttagaccatgagcctccacaacaaacaccatcatcagctcattcttgattagtttttctcttttgattctttttttttttggttgtgttggttaaaagttaaccaatgtaattgaagatttcactagttcgatcccaaagcggtcaaagttattgaaaatggcgctctagattttgttttttgctttttgcactttttatcttttagtatttgatttctttcatgaactagtggtttataccgaagatatataaaagaaaattcagaggataaaagtaatgaagggacgtatataaagagaataatacagggcttgcttaaagtgctttgtttgatccacctaaataaacaagatagagcaaagggtacaaataataaatcaaggaaatatatatggtgattgagcttaatcataaaaaatatttaataagtattgtttaagttcgatttgtagccgttgaatcactacttccatttgcttatttgattctttttgttttcttttgatgagattttcgctacattttcttctagcttcgccaatattccgttcaaacttgtgtgttagaatcgaacgtaccaagcttgttactgttttttttttttgtggtctgacactacaaagacatggtttgtaagaatgtcaatcaattgtgaggtctttaataaagtgataattaatttatatatgttagttcttttccattgaacatcaggttgaaagtagtacaaattgctgtttagaaagtgatctataagccatgattcaattggttaagattttcaatggagacaaatttagatattgaggcacatcctttcttctttattgtctgatacattctctatagaaagacagaagtaatatttaaatgttccaattaatgctagaattgatctttctaattagaatatagagcatgaacatcttgtgtgtccagaggtgttagagtgttcaataaaatgtctaatcttttcatacctatcaaataagagatgattagggtgattagtgaattaatggatttgaaattaatgtttgtttattgcctaattacaaatggaagtttgatttaattaggttttcaatagaaggaatatgatcatggaattgagttaatttatttatttttggagttggctaagatcaagtctagaggaatggcacaagtgcacacacctaaagagatgagctgaagaaccataaggtgttttgtggttttgctatttgcaaaagagaaaataaaatgcaaataaaattctaagttggaataggtggtcttacaagtttcatataagcagaggcaaggattcacaaattgatcatcacaatataaataagcaatagagaattgtatttaaacttagttttggatttttttagtggatgtttgcaagagttggtccttgcacatgacgtactctccagttcggagagaaacacgttacttcttggcgttgatagttcttgtttacgcattcaaatctaaactacgaactaaggctaatcagtttaatttgtcggaaaaggtaattgaaaaatccaagcggtgaggctatccagactctaactacataatcaaaccaattttgaataaaaaacctttctcactctctgttttccttttctgctttcttctatgtattgttaaatatctacattagaacttcttagctagttgaggttctttaagcctttataaacaattataaagacgaccttcttaaagaatgcaacatgatcacttggatcggcatgcatgacaaggtggaaaggaccatatatgtgaacgaaagcaatgagcagggaaaagataaaggactagaatcgagaccaatacacaatccattacataaaagaagaagaatcaagacaagaaacccaattttttattggagattgcaagaatttaaaatagaatattttaggataatcaaataacaatattttagttagtcttgacctgataaaaagtattcttagatttccatgatataaccatttttccttaactctttataaataaccatcttggactagtagaacagcattggattttccatcgattcatatataacgggtatcaatatataagatgtttaaattaatatatacactcgaactctcgtaaagacaaaacttaatgactaaactttagttggagacttttgttttttgtgtaaatgtaaaagatggacagtcacataatgcgtatagcaaaactaatgtgtacaaaagatgttaatttctacaaacttctgagcacaaatcaaccacacaagagagaagaagagacttggtccttcatagaacataattgaacaaacaaataaatctttttacttctggctttggaagaactaatttagaaggcgaatcgtcctatttgcatgtaaggcaagaaagtcttcttcttcaaatctttcgtttctgctttcttagacatgtaatggaattcatgggcggagaccgatgatgaccctcttcctcgtgaactcgagttcttggtgtcttcttgcttcctaaacaaacttgtaaacgtctttaccgaatctttgttgtgccttgctcttccttcggatgcacttcggaacagaagaaagtcctttagtctccatttctttgaggaagatgacttgcaagacacgcaagctgatgaagatgtagatggaatagaagacaaggtccctttcctctgttcttgtacatctctctgttcttgttcttgttcttgttcttgttcttcccatggataagccgaaacccgaaaaggcgaaagtgatcgagcaactctacgaccagagttttgacgtctccctctccctctttcctctcctaagccattcctagctttatccatggcgacctcaaaaggatccacgttatccggtttctttcttggggaaaaagctttgcggataatgttcttaccatgagcaataggtgatcttggagaccttggagataaaatctgaggctgatgatgatggtctaattgtaaatacggaggaggcttcaagggtttgattttgcctccatcaaaaagctcttcagcaaaaagcgacgtcgtttcgagtttcccaccaatctcgaaagcgaaatcaatatcatcatcatcatcgttggtgatcttcctaggcgtgcctggagtctcttcccaatcaaaaggaaccgtaagacggtcggagaagtttcttgttgcggcctcttcaaactctctataaaactcattgaatcttctagggcttgttggtgcgcttaagaagcagccagataattgtctcggtgaagatggggcagtcaagctcatcacttccattgtttctagtttcctttgagttcggagatggtctcaagagcaatgagaagaagggaactaaaaaggatcatcaaaggaaggcgagaggaaagagagagtgctttaaaccgttttcgctgaccaaacatataatataaaaaacaacttttggcaacatgtgtgaataatttgcaaaaaatacctaatactatgtcattagtttttttacataatgacttctagtttttgtttgttgagcttttattcaaaggaaacacatacaacaactagtcatttttagcccatttctgaaaatattaaataaacattggtttattaaaatttagatcttactgtcatagtttaaagaaataaaaagagtttggtcaggctaataatattttttaactcaaaaatttatttatagaaaaaactctattacgatattttctctctaaatattaattttattgtttgatatatccaacattcttctagcatttaatttttaaactatccaactagctttttttgtatactcttcgtagctaaaacgatattattagattgagtggtctatatcaatctgttcgaagtcatatgttatacagttagactactgaattgaaagactttaaactataaaataaaatatgtgatgagaattggaaccaactagattgattgtgttggaaatattccgaagataataatagtaaacgatgattaacgtaaattaattggccgccttttcagaccgcatgtgtcgaaataaagttgtttaatgcaaacgatttggaacataatgataagtggtggtaacccacttacatgttttgaattttcagtcattttcatagtcggcattgaccacatggttgttggaccattcgaaggcatatttagaccacgaggccaatttaaccggtggtcctaataaataatatcgttcaaattaattcagtgaccaaacgagaggacttttgtgttctacgtagaattgagttcacacgatccatctagatactggataaggaacattttgtttttgtcgacgggtaagatgtatactactagatgatcatcgtgctcatgcataagataatttatacattaatacattgtattcttttataataaacatagactagattttaacccgcggtataccgcgggacgatttattttttaaaagtaatatatattaaaacttgcaaattttatttttataaaatatttttattttacagtttataattgttattaggtaacgttataccacgaatccatgagataattgttaaatttttataaatattgattcaaatacatccaccatataacccaattccaaaataaaacccgttttgtaatttttttacccgtcccgtgattttttttttaaagtagtaattttaaaaatttaagaattattttttatatataaaagttttgcaaattgtatcattctctaatacatttatattttattgtttaattttatatatagtaacattatatataccacataacatttttggttttatataatcttttctaaattaggatgatttgatatgttaaatattagtggtcttaaaaaataattaattaaagatttaacccatattgaaacggtggattaattatattttacttttttattaatgttgattcaaaaacccgtccctccaaattcgtcttgccaaaaagttatttattttattaatattaattttattaatgatatgactctgaattatattctaaacattttagctaataacataggagtgcaccatatttatttaatagggtaatgtaccatatgatccgaatacacttttatccaaatccaccaaaaaagtcttgcaaaaatactatagagataagaaacgatagtcggttttgataggtataagattagcaaatatattagttagcttaaattagttaaagaatacaaattgaaaaggtatattacattattcgaatatagtatcaaaacttatataacacagagatttgataattttttaattgttgaatacttttttttgtgctaattttttatgtgattaagatttaattgttttcgtatataaaatattaaattgacttatttgtttataatttggtaacagatagatatttgaatattcagtatattttgcttcagtttaggaaatctttgatgatacgtctttaaatccaataagccctataatctagatattaacctgcagtataccgcaagtaggcttatattttagttaaactaaaatcttttattgtaaagatgatttaaaaatatatgatattattttatttgattttatatgtatagtaaactgtgagttcatgtatatgttttgttgatattatctatattgtttagtgtttaagatcatacacttgtagtttgattgttaatttaagagtttcacctgtagtattctatcttgtattaatatcgatctaaacccgtcaattctaggattttcctgcttttattaaaaattgaatcacatctaatatgttattaattattgtagtatataagattataaattttcaatataatatgtatgaaattgaatataaatattttaaattgtgactcgttactcagtagaaagttttcttaaatctatttttcacccgttataatattttttcatgtattgaacagtttatattcgttttttaaaattcaaattgtggcatatgcgaaataactctaattctttttttataataatgatattatttttccgcaaaaataaaatcatataaagatgagaagtgaactataataattaataaaaaattaatatgataatttacatatcaaatataatttgttgattttaattggttacttttttggaaattaataatgtatttcgttttttaattaaattaaattaattaaaattcagatatcaaatcttatatgttgattttgattggttattatttttggaaaataataatgtatttcgtttttagttaaatttaattaattaaattaattaaatttaattaattaaattagtatttgactttttaatccttaaagagataaattaatctactctttaaaattttatttctaatggcatacctatgtaattacttacaaaaattaaggttacatttaaaatgtacttcccaaataatatagtaggatatacaaaatttaagcaaacaatataaaattgtttgtaatccatgttggttttaaaatgggattactctagcttcttttttttttttttttccgcagggattactctacctcaaaatgtaacattttagatcctttataatgacttcccaaatctcataggcattatatcgtaaatactttgaaccttcaagggaaagttcataaatgtacttatcaattaatattattaaattattaaacaaacataataagtttggattagttgcatctacataacattgctttttgttcatgttttttgatcatttatgatcttagcattcacataataattaatgagtatatactgtacgacaaaagctatctgagatatcttacaagggcttcagtattttctcaaaagcatcatttgctttctttttccctgtcctctaaattacaggcactgaccaaactcaaagtcctccataagtaaaatctatgagaggatggcacaagtgtaattcaattcctgctgctagggttacttgaatctgcgtgagcacctagagcttccattatgctctcgacccacctgccacacacatacacaaaaccatggaaaacccaggtggcgatatatctcaatttgatcagttatttgacaagaggacttaatccaaagcctagttcatgtgttccacatatgaaaagatcaagatttacccttcaagtcctggtttctctgggtagtagacgtttttcaatcctagtcttctagcagctgatgcagttgtctctccaatgcaggcaacgtaattgctccattgctcctcattttgaatcagatgcagccaggcgctgtcaaaatcacgtaagcgatggaccaaacccactcgatcataatagaagagattatatgaatgaggtattgctgagtgatcaaaaaagagacagatgacgattgatggcgcttaccgaactgcagaaggagaagctacagaaagaacaggagcagatagtgcctgttgcaggagcaccgtatcaacactctgcaccggaacctagtaatagaaaaaaaaacagaaaatgaccattacaatatctttaaataagcacataccaagggctaaaacatgtgagccaatataaaaattatgactaagccaaataatatatgcaatgagttactttttatagggcttgtctactaagtgtaacgacggcttactgttgtgtatgtattcagcctgacaacttcaaacccacgtttggacaacccttccactaagattcatatgtcgaacaggaagcagagtaagctggtcagtcatggacttcaaaatcttaaaaaatacatacataaactaagttaattaagcatatccaaatctatttactgcatctcatcaaagatttaataatttgatgaagatctatacttcaatcccactgcctaataaaactgtacaggatacgaattatctattgtatttttgttgttcagcgctaatacttttcatctatgtggtcaacacaataagctcaactgaattgagaaaacctaacaacacacaccaatatcattgcctgcttttagagaagccgggtataagacagaggaccttttgccaactttctctggaagctccgaagccaagactttaccagttgctgaaacaatgaaaacaaaaccagccaagactgtaacattgtatgtacgacgaccactcataaattacctatatttacattggcttgatgaatgcgaagacataaaagaaaatacataaacattgatgagagaatgcttccatcacaaataattcatcatctcataaacgtaaatatgatcttcgatgctctatgattcatggaaacaaacaatgacaagggttattatgggtcatatcatccatagtcagacacaagcatataaaccaatgataatgtaaattcgtaaactattaaatgcttgaagatgcacagattgcagatataaagactaaaatggagtgtatagaagcagagtctaaatagaaaagttatggaaccttttgatggtgtaaaggcaacatgaagcaatccatctgccgatttcattgcctcttcaaataccctggctgttccagctcctactacacctatttgcacttctggggagctagctgtcctgaggaatggagaccaatggggtttaactcaagggaaacctcgctattgacatagttgtgttagaaatatccatgaagattacacatatatctgaatatctaaataaaacgctagactagtcccattgcctatcaataacaataacaatgacaacacaagaagtgaactcactagcaacacattccatagctttcttctgacaacacatagcttactgaaacagttcaaaattcacaaaacgagtcaagaaccagggcttacttccacgcctcgagaaaaacagaacctgcttctggagatgttatgatgatccagtcaaagctcttatctagcaaaataaaacgaaactaaacatatcagaataccaaaaagtaaacagaagcaagagtaaacatagccatccaacaacatatattaagcataacatagaaataagaagaagcaagagttttcctccattatctgtatacgaatcagaaatcaccatttaatacagaagcaagccgatcgaaatcaggtcctcgcgcatgttgaatcaacggaagctctaaagatgatatgccatttttctcctgcaatttcaccatagtaaagaacagaattttgaataacttcagaaaatttcatgatcccaaatctaattcactgtgaaatgcataccaaagctttgatgatttgattgttcttgcctcgttctcgtgttacgacgacctgaggaatcgaattggagctactaacggaggaagaagatgaagagacggacgaagaaattgaatttcgaattggggaaggagaagcgaaaactggtttgctcagagattggatatgtgaagaatgaaatgaagaagaagacgataatggaggttgaaaagataagatagagcagtgagaaaggagtaataatgccattagaaaaagttccaagatggagagatgttgtctcacggaagcgccggtgaaaatggaatcgtagtcgctttattttgccggtggtttttgtcagaaacagaaagaaaccaaatccaaacgaagatgatgaatagttgaatacaattctatctccacgtgcgttttaatgtctctcttttttgttttttgttttttcatttgagcccaattttgttacactacagcccaatagtgttttttagtctattcaagttgtttacacactacggcccaataaaaatttagtaaagttaaattatgaatcaccaaaatttgttaaatattattatttattatttcaaaatctaaaaaaagttaggtttgcaatcttgtaataaatatagttcaacaaattttttagaaatgttttacatgcaaattatcatcttatttacatttacttaaaaatttactactgatattaccactaaaattgtgtttttacatccaaatatttcttaatattgaagtatgtatgctctttaacactacgcacaaatctctttacgaacacattaagccaactatatgtctctttactttcaattttgcatggtttctttaactaaaattgttgattcaaaaataaaacttcgaatgatagtatatttataagaaaactacaatttgaaaatattcattataaagttgccgaataagaccaaaatttcattttcggttttgaataatagatatcaaatatatatataaaaatgagcgattaatgtcgtctacaacccttggccttccaagctaaggatgtgggttagattgatatatactagagtcttagataattcgaagataaattaaattcaaaatgtcaaaaaggtaaaaagccaaatgaactattatgttgatgtagcaaccaaaatagctagtgagtcatatttgatctttttattcagataattagaagcaatgattagtgtgcaaatcaccaaaattcaaatatatataactgaggaacaacaatatcttatcaaacaatcatgagacgaaggccacaacctttggctacatttttcaataagtaatttggtgacttatctttactgctgacttaagccaacaaataacagaaagttactcttccagccatgtaggctggctggtggtcatcagcttcatttccagcactgccctgaattagcgagaccacaatgcttgcggtatgcatattggagcaatgcaatctgcaggggagatttgattttcagtgaagagacagttgacaatgaaagttttgaaactattccagacttaccgtagtgaacacaggtctggtgccggaaactgttaactttaaaacctagatatttacaagatgatcaagcgaactatctgccccatatacttaaatgcctttgccgtttccttcaagcatttgttcttctcgtcccgactccagtgcttcatttcccaaaagcatcaccaaaacatcagattttagcaactggtggaatgaagagttataattttcattgacaatctgacctccccaagcacgttaagcttctcacggacgcctttaagcaagtcttgtgcatccccttcccacctattgaactccagctcctttccttccagaagtttctcagataccttaatgaatcaactgatcagttacatttgaacacctcgcatataagggttaccaaacaattatgacagtccaaatcatgggatatattgataaaagtaagaaccagaacacaacagaaccaacaaaaagaatgtacagttatgataaatctcaaaaataaagacaaaagcatagttcacccgttggttaataccacattaacctaactaacagtcggttaacaagttcttttggggcaagctttaaactaattgagcaagcctggtgttggttggttttggtttaggatctgagtgtttctttatcacagttctatttgtaagttgagtctcaatgaagaagaatggaaatcttctcacattctcattctcattcttatcgccactctctcatacccaccataaccgcaaaactcccgataaacccaactctcctgaatccactatatctatatcaatctctaactctatcaaactagctgttaccattcaatatcctagatgtgacattatgcagttgaaaatttcttctatgttactctgtgaacacttatcaaagaaactaacctgtcttacaaataacttgaccaccagcaatgtgtgaaaagtatactaaaaaccagcaaaactcccgataaatcgaactctcctgaatccatttatatcgatactaatctttaatatatcgaactagctttaaccattcaatatgctggatgtgaccttatgcagttatataactcttctatgttactttatgaaagctttccaaagaaactaacctgtcttacaagaacttgaccaccagcaatatgtgaaaagtagatactgtagaaatgagaaagaaacaaaggagcactttctcctgcttgttcttccaaatactttgcataagaaactcctacattacttggttctggtataaccaaatcttgttctcttaaccattgtagatccttctcaatactttcacatctctctaatcctgttctcctaaagtaagcatctgtacattgaacacaaaccccattaacccaaatcattaccaaactgtcaaattcgagaccaaagtagggttcttacaagacacattctcagattcgtcaacaattcgttcaatagtatcgaagacaagcttgctatcaactaagtacttaagaaacccttctttgctaggcttccaagtctcttcctttacttcatcatcatcatcatcgtcttcttcttcttcttcttcttccttctcggtgtcagttttatcttcagaaagatctaattttttaccattaacattgcgtaatctcatggcgacgaatctcatttcctcagttataccaatgttttctcctgggtattgtttcctgtaccttgttctcttcctctgtgaggccttttgttgtgacggtgttggtgtcgaacgacatagattgagaagatgcttttgtggctttctctgagttgagatttggaatgggaaagagatagatgtgtgaagatgagagtgagtgagcttacgaggtgtagagagtaatggagttggcctgagaagagaagccatggattccgacgaccaagatagacgctgccttcactttgatttctcgctttcagcctaatcgacaaacattggaaaaccaaacacccttaattttgttattatttacatgtcatgccattaattatttcataactagcctaaatagggcagatgtaaaaaataaatagttttttttatatttacattatgcttagattagttgataagccataaaaaaaaggcttagataattagattagttgagataactttggtttcagtacgtacgtgtctatgtattattcgccattattctattagtataatgtatgttgaaaaatgaccaaacattttagagcatttccatccattaaatatttattgactttattcaaacgtacaagtgaccacaatgtggtgcaacctttttattaatataaatccaaacgtgcattagtgaaacaaacgaatcatcaacaatatacaagatacaataattgatctctttagatcctaattggagcttttgcatgaggtgaacgaatgtctcggatcttcttttcttttgaaagtattcctgctaaccttcacaaccaaaatttaaatatattagcaaaatacttttaatcaccttaagtatgaaagaataaagctataaaatgcaaaaattgggccacttactttataagagcatgttcattagtcgtttcataagcattttcgttacaacccgagtctaggttgactcttgcaacaggttttttaagtagttcatctcctgtcttggcaagaatgtccagattctcgacggtagcgatatcaacagaagcagcatccccagttaatgtgtcatcctatataattaatacccaaatcttaggaattgtggagacaaagaaaaagaaatggttagtgcgctagctgattttgatacctggatgcgaatatagttggcttcggaatgaagagctcgaaaaacggcagagagatggaaatcaaccatgtcggagctagcttgcgagaaagcatcaatgataggtgtagagttgtcgtgtgttaaccaattcaatagtccccaaccagctacttcttttgcattgaatttctcttcggctttatgatttccggttccaagcgaaagcacaagaaaccttccgtaatcatttggtcttattgggaaaaagtcactgcttcctcctgagatctcatttgttacttccccaatggccaacaaagcctatacttgacatataacaactatatcatgatctattcaagatttttacagaaaactcgtatcgattattataagaaattccatagtaaaaaatgaaatatagtctaacattgtgtgttcatgttataattattcaatttaagtccataataattgttgatatattatattcttcgtataaaaaccctattgctacataaatgataaatccaatatttagaaatttaccgggttgttagctgcaactccaccatcaataagattgtattctttagcgtttccgtttaaatcttcaactttgaagaaatgggcaggcaagtatgtaggggcagctgaagttgagatggcaatgtctgcgagggttgcgtccttgagaggatggttttttacctataaaatagtcatatatatattaaaccaaagttttgttaattattatattgtaatttcacaaatagaacaagctataaacaaacctcataactactaaagatagtaggttgaagatgcttgatatcgaacgttggaatgacaacgttggtaagtgtttgactcaactttgtatcacccaacttagcgtggataagctgatgaaggtatttaccgtcatatttaggaccagtcaaggacttcacgagttttttggcggctgagaatgggaaatgatcttgagggaagatcttcggacattgctcaagatagaaatctttaatttcagacgctgcaaataagggtcggccttccttattaggcgcggtgagcatggctgtcactagaccaccggtgcttgttcccgctattacatcaaagtagtctgcaagccttgcttcttctccatccaatttctatgcatccatgtatatatatgagttaagaaaatataattttacaaacataatatttgtatagttaggtagcacatatatacctggagttcggactcgagaaaaccaaggataacggcagggattagccctctaatgccaccaccgtcgatgctgaggattgtaactaagtttccataggtcgggggctggagaggagatttggggctgtccatttgcatcttacagaacaagcaaagcaatgtattgatatttcttttttttaatggatatcaatgtattgatacttgaggagatagaactttgattgtgagatattatgagaggttaatgaactctatgtatttataggacactagtggctgctgtttcaaagttagaccatgtcttcattcttaggatattagcttgtcaaattaacttgcatacttcgtcctttggtttgaactctaattctattggttcttgtttcttcctttgtagacaacatggacttttcgtgagcctctttacttcttccacattaagaccatgtcaacccttttattacaaaactacaatgtttttttttgttcaaatgaaattaacttccccattttcgggtttcttggtatgtcacttttttctaatgaattctaagctttatataattttcgtttagattctgctcacgagttcacacacaaaggatcgttcttctagtcacctagagacgatgttaatgagagaaaacaacctacgatgtaatattactgctacttatacttccaacaatgaatcttttgtataaacaacgtaagcaactaagcatggtcaattggtcaaagaagttactttacgttcaatatattatggggtaaagacagctgtgtcatgggagttttgaaaaaatcagtgccgtgacaaatagaaagttacaaaaaatatcttttatggcaatattagaaaatctttagtattttagccgccgctcaatacttatcccccaacactgcaactttctttcattgaccaaatgaagtcaatttgtacatacaacaatttgtttttcatttaacacccttagtttactatactcaattcaaataatataaatatgcatattttcccagaaaaaatacttttattctttctaaatccaccaaaattcaaaaataaatattaaattatttattaataaccttaatttcaagtttttttgtttatgtaatatttgatcatttaaggcaaatagagacatactcaaagtccaagtttgatataatttgtaaaattataattgatttcaaaatttataacacatctgctagaccgtgagtaatattaaattcgaattgtcactgatggttagtcacatatgtaaaaaagtttgaaagagatttaagctatatttattggttttaataaaaaaaaaatttatggttgaacctcacagttacaaaaataaaaatatattaaaagaaaagttttttttattacaaaacaatttttttttattgagcaataacttcttgatgtgaatgttttattgagcaatatcgtttttttttgtggtgctctaccgtaaaatttcgtaatgtatttttggaacaattgacaaagaaaagaatagaatcgcatatattattattattttccgcgaaaacacttagaaattttgtgagcaatatacttttatcctttcaaatcacatgattcgacattgatatgctggaatatctttttttctcaagacatgcaaagttgaagtttcttcatcattgagttgatagaattctttgattagatagataaagagatggaaaatgaagttgacacttttattctcacccaccaatgtgaagtatttacaattggttgttttttggatcccaaattgcagttgaaatgatgacaagaaaaaaaactgcggttgataatcaccaatcaaacctatactattatccctgtatcccaatataaaatcaagagttgtacttgtaattatatttaagtttgtctatttaaaactataatgcaaagaaatggttacatttgtttttttttcttattctttttcaccggttacatttgatttaatgtaatacttttagaattaaatagatcttgcatttcatacaaatttgtatgtttgaacatttgcaaagtgttatattttattaagaccaattggaacccaaaatcaatgaataattttgatacggcaaatcatcaatctcgaatatgattagtaagtgagtgaatgtgtaccaaaaatgacaccttaattcgtcgtcgtcatcatcttattacaattatccgattagcagaattattatttcaatttttgctttctgaatttgaatgcttttaatatatatatatatatatatatatataatatgatgagagagaaatttattgagtaatcaagaaagatgatttgcaaaactaaccacttttgataatttaatttaaaatataaattaagaaaatttactattaagaaaaaaaatttattgagatttctcaaaccatcaatctcatcaattggtaaactactctctcaagatgccacgtagacaaacactctgatagctaattctcaaatgccacgtgtacctgcaaagctttcctacttctcaaaacgtgagaaggtttcattgaggaaattcaaaacgtcattataaacactcttcttagtttatgatcgtctcctctccatctatccctcacgggcctcacccttcttggtttataattttagaacattaattactagagtttatgatttctttcggttctctagggttttcacttcgaattgaagccgataacatattaaaatttagtcgaaggacgaaactttttggttttgaccgtcttgattaacaaattttcttttctttatatcgttctcacatccgctattttatcaattatataatttttacaaagcatatattttcaaccgctaaaccaatcgtttaaactgcttgataacatttaaaaccgcaaccgtccacttttgtatactcctgtaattttatccacattggctgcgtttaaaccaatcacactaagttccaaacaaattctttcttatactgagtatgaccatcgtttttagttgtaaagaaacaaattttttgtttttgatttaatcttactattctgaattttttggtctaaaattccttaaattaaaaaaaaatagaagatttaaacgaactaaaacaattgatacaaatttattttctattaaacaatattacattaaagatcgaatccgggtcgggtaatgtaactcaaaacttgcttggtgcgaccctctccactttgccagcctcattcatctctaaaaataaacaaaaaccagtttttttgttgttgttcaggtcaagtagtttggtttaactactttttatacgtggaccaatgaaacaccaagaagccactaattttctttattaaaaactaaaactgaataacaaaataactaaaaaaaaaggaaaaaaaataaaataaacaaacaaaaccgaacattatgaaagagagagaatgccagatggatgatgaagatgagccgatgagagatagcttcatgatttgtctccgcgaccgcagttatctctttctaatttctgtctgaaataataaattaaacttcttctactacctccgatcatcataatcctccggtaagacttctcttctcttcttgaatcttcttgatgcagcttttttttgtcggcatacaacttttgtatttttcatattttttttttctccagctgataaactcagaattcttgaaattcggaaacttttcatttttctttgaattgtaggaaattatcattgttcgtatttatcttcttaaaaaaacactattaaatcctggaattggtaattatttactcacgtttccgaatttgtttacacaaagatgaaaatccgatgatcttgattaaagtatgtttgattcttgtataccatatttgtttgattagagtaatttgatcatcaaagatgttttgtattcaattttttctcaattagtctttatgttttgtagcaatttcaggttacaggggaatggaggacttaaaaactgttgaagcatctgataatgttgttagtgataatgttgagaaagtcaatcctgagttgattgattccaccattcgagaatctaacatacaatctgcaacaaaggttgataatattccacaatctcaaactgacactgaagagactcaacaatctcaaactgatactgaagagactcaacaatctcaaactgatgacactaccggcaatgcgaagatttatgtcgatgacacgttttcgccttctgatgctgcaaccgctgcggtgttaaccggaaaagatagtacgagtacaacaattgtagaagaagtgatggagccagatgagattggtttacctagtgtcaagattaccgaggctgcgacgggtacagcaagaaatggtggggggtcacctagaactgtatcatctcctagattttcaggatcaccggtgagcactggaacaccgaaaaatgtggactcacatcgaggtttaatcgataccgcagcgccatttgaatctgttaaagaagctgtatcaaaatttggaggaattactgactggaagtctcaccgaatgcaagcggtagaggtattgtactaacggatacatttggattatttctcgttttaatttgttgttgcctttcttgttcatattttcgtgtatggttttgcagagacgaaagcttattgaagaagagcttaaaaagattcatgaggagattcctgagtacaaaacacattcagaaactgcagaggctgcaaaactgcaagtgcttaaggagctggaaagcacaaagagacttatagaacagttgaagcttaatttggacaaggcacaaacagaagaacaacaggcgaagcaagactcggagcttgctaagctgagggttgaagagatggaacaaggaatagctgaagatgtcagtgttgcagctaaagcgcaacttgaggtggctaaggcgaggcatacaacagcgattacagagttgtcttctgtcaaggaggaactagaaactctgcataaggaatatgatgctctggtgcaagataaagatgtggctgtaaagaaagtagaagaagcaatgttggcgtcaaaagaagttgagaagacagtggaagaactcaccatagagttgatagctacaaaggagtcattggaatcagcacatgcttctcatttagaggcggaagaacagaggattggagcagctatggctagagaccaggatactcaccgttgggagaaggaactgaagcaagcggaagaggaactccaaagacttaaccaacagatacattcttcgaaagatctaaaatcgaagctcgacactgcctcagcgctgcttcttgatttgaaggcggaattggtagcttatatggaatccaagctaaaacaagaagcgtgtgactcaaccacaaacaccgatccttcgacagaaaacatgagccatccagatttacatgcagctgttgcctctgcaaagaaggaacttgaagaggtcaatgtcaatattgagaaagcagctgctgaagtgagttgcttgaaattggcctcctcttccttgcaactggaactcgagaaagaaaagtctactcttgcctctatcaaacagagagaaggaatggcctctatagcagtagcttctatagaggctgaaattgacagaacgaggtcggaaatagcttcggttcagtcaaaggagaaagacgcgagagagaaaatggtggagctaccgaagcaacttcagcaagcagcagaagaggctgatgaagcaaagtcacttgctgaagttgctcgcgaagagctacgaaaggcgaaagaagaagcagagcaagcaaaagctggagcaagtacaatggagagcaggctatttgctgcgcagaaggaaatcgaagcagctaaagcttcagagaggctggccttagctgccatcaaggctttggaggagagtgaatcaacattgaaagctaatgacaccgattctccacgaagcgttacactttcgctagaagagtactatgagctcagcaaacgtgctcacgaggcagaagaactcgcgaacgcaagagtagcagcagcggtttcaagaatcgaggaagctaaagaaacagaaatgagaagcttggagaagttggaagaagtaaacagagacatggatgcgagaaagaaggcattaaaagaagcaactgaaaaggctgagaaggccaaagaagggaagttgggggtggagcaggagctgaggaaatggagggcagaacatgaacaaaagagaaaggctggtgatggagtcaacactgagaaaaacctaaaagaaagctttgaaggaggaaagatggagcaatcacctgaagctgttgtttatgcctccagcccaagtgagtcatatggaacagaagaaaactctgaaaccaatctatccccacagaccaagtctcgaaagaaaaagaagaagctttctttcccccggttttttatgttcttgtcaaagaagaagtcacataataattgagttcagtttcaattcaaacgcctaattctcttttgatctattggagctttgtattcagaaagaactccatttgaacaagtattgtggtgtaaatggttttttcatttcttttctatttgtttgcactgtgtaagtcgagtcctccttttatcaaaagaaaaaacgtgatggggaaatgaaaccataaaagtcattcattttgtacatacttgtgtattggtcatacaaatatacaagatacataaaaggaacataaagagcacaatacagagttggatgaggttcttagttgaaatatctacgagagacttcgaagacatttgtcattcactaatttcaatttactcaaataatttcaagtattttaatatagtgaatgacaagtgtcttcgaaatctctcatagatatattcactatattaaaataaataaaaatattttaatatagtttgattatataattaagctttaaatattttaatttaacttattaattaaattatttaaattaacttatttaaatttagttgtataagtcgtataaatttattcttatacataaaatcattagaattttaatgaaatttttgattttattaaagtatacaaattaaataatataatataagaatttatttcatgtttttatatactaatatatatagaattagtaacaatgtatattagttgagtttacggtttattttaaggcaaatatctaattatactaaattaacactattttttttatttattaaaaaatacgttaaagataacaatttcttattagtgtatgtaaatttaaatatgttttagacaatgtaattaaaattagaatgaatcatttactcaagagttagataaatgcatcaaaatgataaataggaaaaacaccaaaaatattatttatcaattaaatcaatcaatgaaaattgttataactaacaaattaggataaatgagagtcatttattcgagagtgaactcatgtgtataagtaagtataagaattagaactaaaaccgaatctcaaatctaaagtactaaagtattgtttccctgttagaagatccgaaagaaaaaatttataaggacttcttatacaccatcaaagctttgaaaatcaaaaagaagcttggtcagtattttggagtcaaatataattagatctcgtgtatatgattcagaataagaattagaaccacaaccgtatcccgaaagctaaaataatatttccgtgttacaagatacaaaaccactaactcatagggaatttgctacatcgtaattagatctcgtgtgtatgattcagtataagaattagaaccacaaccgtatcccgaaagctaaaataatgtttccgtgttacaagatacaaaaccactaactcatagagaatttgctacatcgttaaagaaaaaaaatacttattgtaatatttactatttataattcaagtataagataggtttaccataatatagattacatattttttattttagattcatatatccgaaagaactcataaatcttgtgagacgaaccatacaacaagggccatagaaataaattaaaagaagcttttactaaattataactatagatggttttaaagatagacatcttcacttacatacatacggttccaaagatcatacaatacatatagttgccttctcagctcttgttacttcgaagtctccaacacttatattaccattaatctcgagactaaaacaagacagataaaagtaaaatttatgttagtttacaataaaaataaaatttataactaaggtgaatctctaaaacaattgatgaatagaacagagcacttacattattaggctatcttagcttgcttgttactctccagcattagaccaaagtgaatatgaggaaagtgtgcccactacaaagtgtgaacccaatttaatcagaatattactaaatctagttttcttcaaagatgtcaaagcccaatcttttatcagagttgtataaatttaagatcatataattattcttatttttaatttaaaattggtacccgtgattaactttctacacaactcgtatgagtgactcgatataaacttattagaaaattatatatatacctataatatttaaatcctagagaatagagttaaatttatttatttacaaatttgttaagaatgttctctacgtgtttagtcttaaaatatgttttcaaacacaactcataaaattaaatggagtatcttccaaatcataaggtctccaagtcgaatttgtaaaaaactataaaaaaataaaaaataataataataaaaaaaacatctactatgacatatgtactataattaaataaggaggccgcaataattctttattggttactaaaacttaagatatttcttttggctaaaaaaagcttatagtactttataaaactgtttgaacatataaaagaaataaaaacttacattcttggcagcagtgctgaatgcttctctgtggcttatgtctggattattcgccttaatcctctgaatttcctctcttcaaaggttttaatataaacacacaaatcaataacctctttcttaacagatttgaacattatatagatatatagatatatgtatgtctaaaatgtttttgttactttatgaattgattgtacgcagaaggtactcgctgccgcttctccggagctgaaagacaatataataattttagcatatacagtacacaaattacttttcatgtttacttctttaggtttatatagtaagcaatacttacgacggtttacaatccgttgctcagttatggtacgagttgaaattcttgaagggatttttgtgtggcttcttgaggaggatccatactctggtactgcatagtttgttgcctgataaaagtataaatgctaagaagtttagagtatttaatcacttggccttttctttgatttttcagaccaaaaatggtgaatcaataggattgagtagcaatcatgtatgtattgtctagtttcggaaatgaaaagagaaaaaagaaagtggaccaactaaaagatatttcattcatatttaagagtagttaaagtctaaaagacaaaacctttaaagaaaggaatctgatatatatattttatagaaaacaaaacaaacctatgaaaccagaaaccctaacattcatgtcaatcaaatcatagagtaagtaaccgacagcagtaatagatcaaacaaaagctagggctctatgaagaaaaagcaattacgaaaaggctgcagatatcagtaacagctggaaaaataaacttaaacatgacttgaaaagagtaaaatatttaagtaatattaaattctttggggctatgtagatgtagacggcggctggagacagaaacatgcaactagaggctcagatttctgtctatcattcgtttttcaaaacaaacaaaagagccctaaatttcagagggttggttcaagtttttttttttttttttttaaatttacaataaacccttcacaattgaggagagagatgttacctggaaattagggcgtgaaagcgactgaagagcagctgccatgtttacagaccacagattggtgcagtgaccgcatcggacggtcacgatgtcgaacaggctgctgcatgggacattcacctacacgttttagccaaacacaacctcaaatattaattaattgatcttctttcttggaaaattggatctgtttactagatgatccataagacatagatcgacgaaaagcttatactaaaatttatgctactaaaatttgttataagataattatcattagacaagggagaaaaagttgttgcttgtcttgttaatatagatcagatattcctatcatttatgggtttttttttttttttgggtaacatgttaagttctttatgggtttagaaggcaaaatagaaataatgcaatctaatcttatgacattaaacaaaagtagttgcttgagagatgattatcttctcttttgaagttttgctgtagccaccatttaagatccggaagtgactccattttcaatatgcgcaatttgttatagattagtgaataggaacacacatatttttgacaaaaaaaaaaagaaaaggaacacaaatatatgcatggccattttaaaataggttatcttatgagtcataacttaaaatggtaagtaaaatgctcgtaataggattttcctttgaggaaagtaggaaaagagcagaaaataaatctatatgatgctgaaaaaagtcatgtatagcagaaggatggtgacttctctctggcaccataagctaaatgaaatatttgtcactgacaaaaataaattaaaacagatttaaatgaataagaactttgaacatttgtaagatagtggaactgatgaaaagagcttcaccactctttatcagaaaccaatatatagtacaaaggaaattaaaggtagatctatgcttgattatatctttatatatacgatatttggagaagcatagatccattatatataatataacagcagatataatagatatatatgtatagcaattataccgcaagaattatgttgcaaaagttgcaagggatgtagcagagctgttcggttgccatcacagagttagccatgatcgatctgagaaataggaccaaacaagatgtttgtgttgaagatttagatagaagaagagagcaattatataggtgaaaagatatagtctctctctctctctctatatatatatatatcaacccgaacagacacttgccttaaaaacgggtattgtacttcaacaactattccaagtgatcataaaggtaattgaataaatgggaagataatacataagcctaaggagaggatgagagttaaaggggcaaaattattatatgcaatgtgaaggatttgggaatttccatgtaggctatatgttctatgtcttttaacgagtagggtcccttcactcatggggttgcgtaccataagaaaaaaaaaaattcttatcgaaatactgagatggacatagtagttaagtaatttttttaaaaatgtagtaatgtaccagttttgttataacattagttaacggcaataaaaaacgatatattttatttaaaagagacgaaactaaatgttatggaatagataaaaaattgtagaaaaaatattttcgtcaatgatttactatacatcgtttatatctattatggtgaaaataaaattactaagaaaaaaaaaaaatatatatatatatatatatatatatttatgttaaagcaatttacaaaatttaagttcgatatataattctttttaaaagtgatgattgcctaaacaatattttgaatcataatgttatacaaccaatccagggggagtcggctatatgcaagatgttgtatgtagtaatggaagaatatttgtatgcgcgagaatattgtatgtcggccttccttccaagaacactaaattgagatactataatatcgatggtataaagaaagattggtatatgagaacgttgatgacaacaacagcaacaaaaaaggtagatgagaacatttcctcttcgacattattcgtgggatacttcaatcaaatttagggttgaattttttcttttgtcgaatgtatgattgtttagtagactagtactgctgaattataaaaaggttgattgtttaaaacttggcatttatggttagcaatagatgaaaattttacctgtattattcatttctaaatcttgaatataaatgcaaatcagaaataaataaaaagctactcactctctttcacttttcctaagagtatcattaattataaacaaaattcacacaaattaagaaaaaattatgtaaattttcgaaggtaccatttaataatacactaaatagttttatcatcctaattgataaactgaaatcaacattttcatatgatatatggttctctctaatatttttttttttaagacttacatttttaaaaagaccccaatatttttttcattctttcatattaaaaattggatcaccaaatcaataaaaaaatatatgaggatgtgcagactcgtaaaatctagacaactatttcatagaaatggggaaagaggaaaaaaaaaggagaagagtagtgtggctacggaagggtgcaaaagctgggaccagcatgaaagcaagtggccaaatgttttttatatgctttcattggtaattaactttttgatatatttcaggtttagttagggatgagccaaatgctattttggacagctgattagacattagggtttgttagagtccacttcttttagtttggataactgattggatggacattagggtttgttagatagagaaaggaagagagagttctaaacatctgaaaagtggtagacctttatacgagtaacccaaataatatttatatatataaattaaagattgtctatttcatcttagaaataaatttaaatcatgtgatgactaaaaagcttctaactacacatatacagtgtaacctctataaattaatactctataaattaataacctctgtaaattaataaaattttccggtcctgagttgggaccagtgtaaaaagtgacacaaatcgataaattaataagataataattgttttgaaaattctatgtaaatatatgttcctatcaatatcataaattaataattgtataaatatatcaactatatatatatatatattataagtaaaaaaattctttaaaatatatttataatatatttttgcttaaattcatatttgttctttgtttgactatagttttcatattttattggatcaaattttttggtattgttttctagacattattattatattttacttgtaactggttctaggaaaatattttctataatgaaaaaaatcttatagaatttttttaaaagttaccaaattaggaaaatctctctataaattaatatttattaatttatcgataaattaatacctctccaaattaataaaatttcgtagtcctaacattattaatttatagaggttttactgtagctagtttttacttgttactattgtctgtctaatttctactacaaccttgacatacatcacagtagtaacctaatttcccttgatcgccttttcaacattcaaatagagtgttaaaaaaacataatccattcatatgttgacatatataattgaaatattgatctattctcttaattgttgtcttaccataaaatcaataacttgaactataagacatatagagagagattcattaaagttataaaaaactaaattaattcatcaattattccagtgaaaaagaattaagatcccaaattattcaggtgcactaactaattttttttttttttttttttgaggctggttctttattaagaaggaaacaatcaaatatttttaactttattattatgaaaaacctgaagattaattgaagattggtttggagtcgagcgaagttgaatagctcatgtgatgtgttacaaggagttatcatgaaatcgatgtatcatcacatttatggcttcttgcaaccccacattctcccctccttccaccaccgcacttagggggcgatttcctatttttcaattttcacatcattttttatatatttaaactcgtcgccaaattatttgaggaaaccttgaaaatgatgtaaacctgagtgatgtcttaaacaagagaatgtgcactagaggaagtttcccttaagttttacaaatccatctttaatctttccttgttttcttttcggtttagccttgttcgcttttttgctcacaacattgcaaatgagaaaaaaatcagaaaatcactagaataggcatcgcaacaagtttataaagtggaaaacattgtatttcatagcaatgaaatggtatttatgaaaacagcaaagctatttatgatcccaatgaatgatagtaaattttattattttgaatgattttatttctaccattcaatttagtcgagaaacgtgattttttcccagtaacatacttgttatgttaacatttttgatttatcaaataataatttgaacaaaatttatttttgtcatataactataatacaacagatagttttctttgtaaatgtggatgaaacaatgataaagtgtagaaaataaatgagacaaaaaatttgttaacaaaattcagtttttcttaccctcccgaactacatccagatttcgattttactagaactagaaagcaaatagaatatattcgcaaacgcgtaaaccaagtacaacccaaacatacaaaaaaatatggtgagaagacacataaagagtcaaaatgattatacattgtattccaaaattatttttgttctacaagattaaaagaaaaaatgatattttacaaaaagaaaaactacgatatttattgaaatctgtatttattgaaatcttacaaatccatctttaatttttgcctctttttcctatccttgttttctttttggtttagccttgttcgtttgtttgcaaacaaatttgcattgatagtactggtaaatggaaaaatcatgagacttaacaagcatcgcaacatgtttattaaatagaaagacatcattttctttgattacgctttactagaaaatgacctaggcgttgcaatatttgtggtggaacatttgagaaataatttggtgataactgatcagtgataaccttcgtatggttgtgaacttgtaagtgaatattgacattgactttatgttacacggatatgaaaattatgaagaaaaaaacaaagcatatgaaaattatgaaaagtttttctctatggttagggttttctttttcctattgaaatcgtgattccgcatgtcctagtctaattaaatcgtaaaattgatataaatgcttagaaacctttgtggcagaaaaggaaaatcccatgatgatccttacactttcatgaaaactccataaatgatccaccaaacaacgaagatgtttttctcagttcaatatcaaagttcgaacaaaatcatgagaatatgaaaagattaactctcatccatcgcatcccttgattgcgttgaaaccgagtcttcaagtgcttcaaggaatgagtccactgtgaacttgtctgcaaaagttaaaactgcataagagaaaaagaaacaacaagaatggaaacaacatcgtaagaatcactcacatttacttgggtctataccaaactgagtcaaatctatttgtcctgtgcggagtacctaaagagagagatgttgagttagaatatcgacccaagaatggaaacagcattgtcacagatgggcttacataggtaaatgcatctacttgttgacgaaaaggagggctctgcaacaactccagtatatcttctgccctagaatgaccctgtgattgattagattagcctttgggttagtctggtacatgaccaatgtgattagcctcagcttagctttcaatctcttgttctttaagctttagcaacgggtcctttaacaagagctaaggctaaggtttcgcatcatatcaatttggtatcagagccaggttaaagggaagtttttgcttaaaacctctggtccataacagacattttcagaagacagaactaaaatggagagaattgcatgtaatgttcatattcatagaatacagaaacattgaagaccaagacatacctcaggtaaatgcgaagatagtcgttcttgtaccggcaacgcctcaagcaatggcattatcaactccggtttcaagatatcccctaatgctaaacctttgaacgatataacaagagtggacgatgaggtcagtaatgaacaatagtagagagaaagaacaattaacagttgagaacatattattgatcacagaaaaaagctgggcactgccatttccaaccaatgcagactttaggataaatatataatgtcttcgcaccatatcatatacaaataatttaaaacattgaaattatttaccttcgtcttgatctccagcaatacctaaacattacaaccgtacctaaataagtataagagggaaaccaaaaaatcctattgataggagaacctagagatagagaattgtacctacagggccaccagagaggttgttcagaattctttgcaggtctgccagcttaaccggtccagaggacgatgtcacgtcactcacctctgaagacaaatttggtacaaccaagtttcccgctctatgcaagatgaaaaaattcaaataagccatagcattctatataagctaatacttttcacatggtattcaaactgcaaatcaaggatatttgttgaaaatcttcacataataacgaaaaacatatgactctgaaatttaagctttccgaatctcatcaaaaaagagtctgatagcttttcgcagaaaatctattgacccctgagtggccatgtctacacaactttaatgtgcaaagtccatttacacaactcacaagtaggatgtaagttaccaaagcattccacagatgcaacataaggaaaaatagcaagaaaatatatgtttcaatgacactgaccacaaagcaatcaacccatttctgaagataaaatggtaagccagttatgtactttgcaaaaccgacagtgagactatcactttgacattaatcagtacctagatgatgtattatcctctgccatgtcttccagctcctccgtgatagcagctgcaagtccttcttcaccaggaaactctggtgcacaggaaaatttattagattgattcaaccttttcgtcttatgcaattgactacgtattgtcactatcaagcatgcgtaatacacataaagagatgagaaaataacatttacatgctcatatgtgaattattgcagaatcttagtgacattataagtaaaaaggctacaatttgtggcgtccattccatctgggataagagaagttttcgagtgctaaaaaacaataacacattttagctcctcacttcaaacttttcttaatacgcaaaccaacaatgacaagcaagaaatcaaacatactcttgcaaatctgatctttgatatatattaaaaacttcttcaccattcagtcgataagcgcattagactgattggtagtcacactcaagatccatttacgcaggaaatttaaaaaagtggttccttctatggtacaattacaactaaatttggattcgatgaaatataaaagcaagcagaaatatggatttgaaccagtgttctacaaccaaggcgccacctattcgtggcaaattttttcatattcatgatggaaacgattacatgagctaatgaaaagaaattgttgtgcatgctatttggaaagggaagctccttataaatattagtaccatgaaactattaccaaatccgcgttgacacataaaatgccagatgaatgaatgtacgaaggaatatgtattttaattttaaggataagaaagctagtttgctcatcatggaagttggaaggttaaacagtaagaaagacattagtacaaggatgcagtcatatcctagactgtttgtaacaaggtaggaatgttacatgcctagtggttgattgaggtattgattgactgaagagcacaattctgcatcaccttcagctcttggctcctgcaaaataatttagaaatagagttctgagagacaaacaagatcaaagatataagtgattaaggtgaacaaacatacaaacatatctttaagaaaacaaacaagtaacctgcatccagaagaataacttgcggtcatcactgttgaacttcagaatatacaccctgtctgaggattgattaaccttttcaaatagagcttcatctgggaaaacaatttgatcctataaataggtatggtcaaggagaaaacttcgtaactggaacatctggtagcaacaattaataaatccttcagtttttgttctattcatgcatggcaaaaaataaaaaaacctcctaggtggatagagctaagaaatttgaccgtcttgggtcacgaatccactggtatagcaaagacttgatactaggagaatctctagtccttttctaaaattcaaaaaaacaagtgcagaggatacatcttctactgtattctggtttcgatcaagccactggaaatgaatcagtccctcgtcaccctaaaagaaaggataacaggattaaaaaacctaggttaacatttacagagaaccagtaataaacgtgttctgacaccaacaattagattccgatatgctttaacttcaataggaaaagctgatacactccaacgttcaatggaaacgaataaattcaaattactaaatggaaactaaaagcgtcgacattactctagctatgcggacaagtccttttcgtgcatcagggacaactcttgttccctgcaaagacatcttcccagcacgaaactcaagcatgatctcctgccaaaattagtccaaacataagtgtaagaaccttcgtaattagtctaagaacaataagagaaagataaacaccacctatagttacctgcatcacgggaaacgcttcgcttgaactcataatcaccacctctttctagtgaacactattcagtaaacagagaaatcagaataaattcagcttggtgctcttagatcaaggcttaaaacaagttcttctgcaaagtttattgacaacaatcatatgtatactaaagataacgaaatccgtgaaaattgcaaaaccaaatctcgaacagagcagattgaagcgaagataacaaaacgctagggttaccaatcttcgtagaaattgaaaaaaagagagagagagagagagatttacaaccttaaggctagtgtgttgacaaggttaaagaataccttagcagaggaaagttcgcgagtaatggattttggagagaaagaaaacgcttctcgtttttttttttctttcaattgcgtcgtctcttgtgttttttctttcttcttgtataaacaagggcccctataaggctacaaacaacaattcatccgaacaactccaagcccaatccgaatttttcttcattaggcttttaatttttgggtttgctgcaaacaaaacctgtaagtcaatttcgtttacaaatctaccattcatatccgaactatacaagttaatcatatgaactctaaagtcatccgcaaaataaacttcggtcatatcgatgacgtgacatcgctaaaaaggacatgaatttcattagtttcttgtgccataaaacataacaaaaaatgacatgaaaattaaagaaaatatccattgaaatatcgatttgggggaaacattaaggtttagagagtagttcatttggaagaattcgatatgggaaatgatggtatcgtgatccacttagattacagagtggttcgattgaggtcatattattaatctatattaagagagtcaaattgatttagagggtttttcgaaataactatcttttttatataaattttaaggtgcaaatgattgcctagaattaagaagttgaaagaattgaatgagcattcatctaatattttaccatttaaaatgaataagttggaaaaataatacaaccatttcaagttggaaaaatgaactaattattaaaaataaagttataacttgttcatctcatatttcgcagaggaatgagttgaatatcgcagaggaatgagttgaatagtattcaacttttttttttcaactcaaattttctattttttttcatcgttatccaaccatttgcagccttaatatattcagttcaagtgaatgatcagatcacttaacttagaaaactcacattatttattgcaaacttaatcacttgattattccataatctaattaggctaattctctaccaaacctctctcatatcacttaacgcagccaatatctaaatagtctgctaaattctcaatcatccatctttctatacaaaactaaaaagttaaattataaagtctacaagaaaagttggaaccctagtaaacaaacatacattttacaaacagaaaaaaagcacttgagaaaaagtaatacaatgaggtccatacacgtctgatttagctgtaatgttggtacgtccaaagaaactcaccgtccaaccacatcactacttaaccactacgaaatttccatcttattattcttctttatcatttcttattaaattcaatttaacttcttattttaataaccaaataaaaaagtttcaacaagaataaaaaaaaagtaaagtgttattcatatattcgacagtgacgaaaacaagaaactccaatcaaacccaaaagcccaaaacccagaagaacaaaaaatctctcttttgaaaattctccttttgcaaatcattcaagtgaagcacaatcatcttcttcttcttctccagcttcatcaatctcttctagactttttgcgtttacctgaaaaactgttttgatcgtaagtatctgattgcttcgatgtcgctgtcgaatcagattcccgtttactctcgatgaccctttgcttcttcttccactttttttccacagttttctgataactcttctcagatgagaagttctaagttacttcttctcaagttcttcttcttcttcttcttcaatctgacttcgcttggtacagtgtctttctattattaattctattgctaaaaaaaaaattctaggttaagtttaaatttcaattttcaactcttattacgatgttgggttttgctaatttcgttgattgatcaaacatagttgaatcttaaatgttatgattttgaatttctggttgttttttttctgatgattttttttttttttttttgatctttaagagtatcaagttgatggagcatttgttggaacatatgggataaattatggaaggatagctgacaacataccatctccggagaaagtagttttacttctaaagcaagctaaaattcggaatgtgcgtatatacgatgtagatcacactgttcttgaagcttttagtggaactggtttagaccttgttgttggacttcctaatgggtttttaaaagagatgagttcaaatgctgatcatgctttctcttgggttaaagaaaatattcagtctttcttacccaagactcggattcgcggtatcgctataggtaacgaagttcttggaggcggtgattctgagctcgcgggagctttacttggtgctgctaaaaatgtgtacaatgcgttgaagaaaatgaatctggaggacactgtgcagatcactacggctcattcacaggctgtgttttctgattcctacccgccttcgtcttgtgtgtttaaagagaatgttgttcagttcatgaagccattgttggagttttttcagcagattgggtctcctttttgtttgaatgcttacccttttttggcgtacacttataatccgaaggagattgatatcaactatgctcttttcaagccaacggaagggatatatgacccgaaaaccgatttgcattacgataacatgcttgatgctcagattgatgctgcttacatggcgttgcaagatgctgggtttaagaagatggaggttatgatcactgaaactgggtgggcttctaaaggggattcagatgaacctgcagcaacaccagagaacgcaagaacgtataactataacctcaggaagaggcttgctaagaagaaagggacacctcttagaccaaaaacggtgcttaaagcctatatctttgcattgttcaatgaaaactcaaaaccgggcaagagttctgagacacactttggactttttaaacctgatggaaccatatcatatgacattggattcaacaatctaaagtctgattctcccaagtcactcatttcatcatcaaaggtatgaattctgtcattaaggaggccatagtatacttgtaatgattgtatccattatatagaacattttgctctttgagtctcattccgactttgaatcttctgcgttttgttgcagtcagctcgttactatgtggcattggtcatctctgtctcggctttcctcttgatgatataaatgcggaaatggtgtgagctttgacgatccttggatttggtcgtacattcgtagcactataatatatattactagggttgggacgctaacgaaatggtaggagcacaaatttactgcaattctcatatatgtagccaagagatatccagaaaagatatcaccagacactatcatatatacacatcttatgtaaaacaaatctaatacataaatttgggtctctgcttatattttgttggattggatactggggaaattaacggatatcatattcaaatctttcataatctgacaagcctctgggttctgcgtcatttttgtgtaatagaagactggttttgtggaggtagtgtagaggataaaaatagcaggtgtgtcaatgagagtgtcgtaaatagtgttgaggtaaaaaagatcctagtggtttgggttttcagttatggagagtcttcagcctaaagagaagcgtatcctcattagtgtcttattatctctccctccaaattcacaaacttacatattacgtaatgctgctcatagcgacaaaattcaaaaatgtgttcctcctccgactgtattcttcctggcccaccgagccgaagcaacctatcggctgctgacctgagcccttccggcctcttggcatttgcctctggttcttctgtctctctcgtcgactcacgctctctccagctcatttcctccgtctctctcccgtctcccatctcttgtgcattttctacggtcacctctgttcgttgggctcctgtccctgtccagcgtgatctcttctcctctgatctcctcatcgctgtgggtgaccacctcggccgcattgctctcgttgacttccgcctctgttctgttcgtctatggcttgaacaaagctgtgacagtgctagtgctagagggaagagccttggttgtggtggcgtacaggacctatgttgggtattggctcggccagactcctacgtcctcgctgccattaccggtccatcttctctctcgctatacacggattcaggacaattattctggaaatatgacgcatcacctgaatatttatcatgcattcgttgtgacccctttgattcccgccatttttgtgtccttggcctcaaagggtttcttctctctttgaaacttcttgggacaaccgagaatgacgtccctacaaaggagtttcaaatccaaacagattgcagcgatctacagaagctagaacgggaagttgttgctagcagcagtcactcaacatgtcctgcatcagccgtttttcctctctattccgctaaattctctttctcaccgcattggaaacacatcctcttcgccacatttcccagagagcttttcgtgtttgatttaaaatatgaagcagccctctacgtagtagcattacctcgtggctacgcaaagtttgtagatgttttgcctgacccaagccaggagtttctatactgccttcacctcgatggcaggctaagcatttggcgacgaaaagagtgcgccgagaagttctctattcatctttgttcctctctgtggtattttcttagttcattctgtttgttttctcacttttgtagaggggaacaggtccatgtcttatgtgcaatcgaagagttcatgccaacgattggtaattctgtaccatcaccatctcttctgactcttctaatctcccaattggattcaaccctccagaacatcaggactatccattcagatgctcttttggatagttcagagctcgagatttcttttgatttcaacaacgatgcttttcttctattcaaaacacatttcatatctatatctgatgatggtaaaatatggagttggatcttgacttttaatggagatgaggattctaatcctcaaactaatgagaatctgatagagagtcctactaatggcaatcaagatctccatcctaatatatctttcgaggtctatgataaaaactggaaccttctttgcttatctttccccttcaatatttttgtgtttacatgaaactcattgatacagatcacattagttggacaacttcaacttctctcgtccgcagtgactgtgcttgcgataccaacaccttccatgaccgcaacattggctcgtgagttgtatagacaactcgtgaatttaaatattaaatgaaaatctcaagctcatggataggaatgtattgtttgaaggtggagggaattttcctgctgtagtagttcctcttgtagctttgggaaccgaagctggcacaattgatgttgttgatgtgtctgcaaacgcagtggcagcaagtttctctgcacacactagtagtataaggggtttgaattggctaggaaattcgagactagtttcatactcttgtagtcgggtaaagaaaaattcatatctgtaagatccttaataatttttgctcgatttccactgtttgaacactagaaatgttgctttggtgatgtcaggtgagtaaacgaacaggtgggtatgttaataagctcgtcgtcacatgtcttcggagtggcgtcagtagaggctttcgagtattgcaaaagccagagcgagctcctataagagctttgagggcttcatcttctgggaggttggtttctttactttttcataggcttcacaaagagatgaaagagtctttgacatcatgttttcaggtatcttcttattttgttccgtgatgctccagtagaagtatgggcaatgactaaaagccctgtgatggtgagtttggagtgatggaaatacttgagaaagttatgatgaaatgggtttgtagttatattactatgtcttgtactttgatgtagcttagatcactagctctcccattcacggttctagaatggactctcccaactattccaagcatagctcagaagagtctttcaaagcagctttcgatgtcttctaaccaagaagtaaatgttacacctagtgacattgaaactccaaacgcatcagattctagtaagcgactttctataacaatttaatcatcttaccttgaaacttgtgacaaaggaattcctttctaacagaagctgtagctgctgatgcactccaagatgatgcttctgaaagtttcgcatttgcactggtaaatggttcacttggcgtatttgaagtttacggacgaagaattcgagatttcaggttgcttttcagggaaaacatcctcaaagccattttttatttttacatgcactaacaatgttaatttaatttcttttgttagaccaaaatggccggcgtcttctttcatctctaccgatgggttaattactgctatggcctatcgcttacctcatgttgtatgtactatgcctcttgatgatatatctgtctggttttaagcaatatcttagaaaatcacttaacaggttacaggtgacaagttagggaacatacggtggtgggatgtagtatccggtaactcatcttcgtttaacacctgcaaagaaggaataaagaagatcaaattttcccctgtcttttctggcgatataagcagaggacgaataacagtgctattttatgacaacacattctctatctacgatctcgtaagatttcttgtaatttttagacgttgttataagaggtctcatattcttaagtcataataatggtctagtgaacactttttctcatagcttttacttgagttgtttataaacaagtttgtcattccttagtaaaccatgaactttgtatcttcattgcaggattcgccagatccgttggccatttctcttatgcggcctcaaattcctggaacccttatacttgaacttgattggctgcctctccgaactagcaaatttgactcgcttgtgttgtgcgttgctgggactgatggtagcttccgcctggtggaggttcatttgtaagtgatgtgtctgcttcttagtgtataatgtaaagtcagaggagaatcatcttgatgtttattgattttttacatacagagatgaaaaaatgacaacccaaatacctcccaaggaaagatttcgttctgtgcctttatgcactcctatgttactcccaacaccacatgccctggtaaggttaatctatgtttggttttgagctgatcagaagtaggttagcttacagtctatttctaggcgttacggatgatcttacagcttggcgtgaagccatcttggttcaacacttctagtacatgtattgacaaacgaccacattctattccgggaagaacttcatcttctaaggatcttcgtagtttcatgattgatttcccaccaatcggtgaccctgcggtgttggaaatgtttcttaaagtattagaaccatatcgctcagaaggttgcgtttcactgctaattctccataaaacattttgtttgccttttcatgatgaatgatgtttcctcattttttttctgtaaaattgttcgaaatgctgatggctaaaggttgcctacttgacgatgagaaagccaaattatattccagtctagttaataagggttgtgctgcaagatttgctttcgcggctgcaatttttggagaaacttccgaggcacttttctggctacaactgccttctgccatgaaacatgtcgtcaacaaaacagcaagtaagtctgcgaagaagcaatttgaggagacagctacgctgagtaaaacgtcatcaaagggcccatcatctacaggatttgagaaaaatggttctatggtaagtcgtactatggaataaattagaaactgaatacctttttgactgaacccttatgaatattatgtggttgttgtacagagtgaaggtcagcttagactaatggcttttgaacaaaaagatttatgggtatgcgctaatgagcgaataccgtggcatgagaaactggaaggggaagaggccattcagaaccgagtacatgagttagtccttatcctgttccaactaacattatacttgaagatttgaggctaacatactgtttgcttttgatgagcagacttgtatcagttgggaacttggaaggtgctgtgagtttgttactctccacttctccagatagctcttatttctatccaaatgccttacgtgctgttgctttatcttccacggtgtcaaaatccctcgttgagctagcggtgaaggtaaaataaggtaaccatatttcatctctgcatggggaatcacaaaacctgacttttttccttgacattgtttccatatgaaggtagttgcagccaacatggtaaggtcagacaggtcactttctggaactcatcttctatgttcggtaggaagataccaagaagcttgctcgcaggttaggttttgcttaaatttttttggagaaaatcttaatggggtttcagatcccaagatttcttaatgtgtgggtcagtgcagttacaagatgctggttgctggacggattctgcaacattggcagcaacacatttaaatggatctgactatgcgaggtgtgtcatataatctttaactatatcaatggtgatgttggtaatcaattcaaataactcttgttactctaaactcagggtgttgcaaaggtgggcagggcacgtcgtgaacattgaacacaacctctggaggtatatttatatatacaaccaaactaatccttcgttttggtataatgtattccattataaatgaggatacaagtaaccttaaaatgaatcttcgaatttcaggggtgtgatactatatgtagcggtaggagcgtttgaggaagctttagcagtatttcgcaaagctgagcgggcagagactgcagctattttcattatggcttgccgagaaactctagcagatagttggagcattgatccaaaaaatgaagatgtgatggtagttactgaaagctatgcattgtatcagaggaagttggtgcatttatgcatggattcacctccatcttttcactgatatcatgtgcaattgacatctaagtttaactaatttagcaactgtttatgtttgaaagaaaatgagctaaagcttacgttttggtagagccatgaattctaatgtttgcatgtttatccctacagtatacagagaaattgatgaggacaattgtctttgtctagataatctacaaagaagatgtgagtaccttttgaattcagtggagttgtttcatgagatgaatataagaaagtgtgtaagatgtgttatgatctaatgattgtcctgattgaataaaggaatgataaaatcacagaataggttagtctggagctttaatcattgtgaattgatgacaagaaaaaaactattatacttaactctcttctttgaacgatcactaccacattcaaggatcttttttttggttatttagtgtgttctaccacattatattactttgaactcactgcattttttagtcaatttttttgccttgaaaacaataagactgtttgttcaattgttgttctgttcaccggaagaaacacaaatcggttcttttacttcaagaactcggtttaagttatatgaaacaaatgaagccaaattatatttaaacaaagaccatttaagaaaaaagataaaaaaaaaattataattatttctactttttgtattaatgtaaagtttattaaaaaaaacaattttacaataaatgcaacacaaagcggagtgtaaaccaatgtgattggatttcttagctctaaatgttcaactgctaatccaagtttctacactaataaattaagaaaatgcaatttattgtagaatattgatgtaaacttatcaaaaaagcatatatatatacatactatatttatgatatagtttagaatttttggctacaagaaaaaacataagccatatataaacttaagcaattacttttataaatgaaaataacatatacaacatatcgtcattgatttgatggactgtcgaactaatttagacaatgttgaggaaacattttaccgcgagcaaaaccatcaacattctcgcacaccgtaatggatgaaccatcttcgagtccattctgttttatgttaatgtcaattagctccacatttttgcatggaaagcttttgctacattgcaaatttactgctactttgttctttgatgtgccatatatattctttaacttaaggtcttggatttgaacgtgagactctcactggaaaaaaaaaacacaacttgtctttagtttttgttcttgtgataaaataaaataatatggagcttgtttttgcataggaagttaacctttctttcatgttcacaaggtgggtgaggacaatacttctgatcgatgttgattggtttcccaacgtcaatcatctgaatattctcgtacacgaagtttgaaacaaggatcttcgaagctgatgattcccaagttttgatccgaataccatcgcttgtaccattgaaaatgacgtctcttacgaataagtccttcacgtctttctcatctttgtttttccctaagcttccaacactaatcccatgtccaggaccacaattgatgttagagatattgagtttagtggttccagagagaattgcgatacaatcgtctccggtaccgatgtttgtgttggagatttgaatgttactacatgaacccatcttgataccgtcggtgttgggactatcgctgggagctgttatagtgacgccggtaatgttaaagtgatggacaaagaaaaagttgaagtgtcccattttgctgttgagagatgttatgtctttgatatttgagttgttcacgaatgcaaatcccatactctataaaatatttcaagtttattaaaagacttgttactttaataaaatgtgtatagtaaataatgattgaatagtacttttttattattgtataagtatcatatcacacattttgtaataagctttaaatgtaaataataatataagtgaaaaaagtttaagcaatgttactatagctagtttaggacagttggggtttttgtggcagtcattgagtggccaagactgttttccttggccgtctagtgtaccggaaccagagatagaaagattgttgatgtacctaaagttgatccacgtgtcttgcttaatgtcgttaggatttgcaggcgctaataatgttccatcgataatgaattcaataggatttttgcatggacccacgaactctacaccacctaggtaaaatgttccttttggtacatagattttactacttccacttatccttttgcatgcacggctccatatacttgtgaatgcctaatttcatatccattaagaatgacataggttatttactaaacaaaataaaccagaaaatattagaaaaactatatttatctttcatgtatgtatattggtgatcatatatgttggtgtgtgaataatactcaaagatcttcatcgaaaaactaattggtggtaaaaataaaaataagaaaatattcgtttacatacattggtgttatcagtctttccgtccggtttagaaccatggcgttgaacgttgaaaacttttggtctgatggtagaacgacttgcaacaacaattaacaagagagacaagcacaaagccttcaacacaaaagcaatgcatgccatcttattcttttgtttaaggtatatatagaaataagaaaacttgttgtttatcaatacttgttctaagagataatgaaagtgttggcctacttaatctgcttatatagagttagcttggcacgatgacctgtcaggaaatttttttgattattgttactaattaacaactgaaatagagttgtttttggtaatgattgtgattggttagtatgctatataggtttttgattgtatatggttatttttttgttttctcctttaaaacagaaatttcaatttggtgaatgtgacaatcacattctgtcatataccaagtaattgttttaatttaaattgtataaaaccaaactgttttcctaatgcactgttttctatctgttccaatttaaatggatattaaattttagtatttcagttgttctgttacaactagtgtgttcgtttagtggccgcatgtcattgcggcagcggcagacgcaagaggtgttgttcgtttgatggacgcacgtcgttgcgaccaaacgctgcggcaaacgcaagtcgttgcggctaaaaattattaacgccaattaaaatcagcgttaagttgcgattgacgtgaaaatgacaataatacccttaatatttttgagaaattacaaaagtctaaacctaaaaatggttgcggcagacgcagcttggtcatcgacaaattttttcatccacaaatttgttaatcaacaaatttttctcggcgatttgcagcttgatcccgacgagcttcctctgctcatcaccttcctctgttcgtcgagcttcctctgttcatcaagctcctctgttcatcaagcttaaacattgacgaaatcaggtttgttcttgtgagattgataattttcgaaatgggttctcttctcttgattcttctcttctcttttgatcttatgtttatgggtttttgttgaagttctctgcttagctcaaatctaaacggttctgagaatttgatttactttgtgctcttctcttttaattttgatttgaggtctctatagctatttcctccaagttggtttcaaatttgtagtgtttgttgaacttatagggacatatcatgagacgtgttgaagaatgatgatcgatattggcctttttttagagattgtgttggagcacttgatggaactcatgttccggttcgccctccaagtcaaactgcaaaaaaatataaaggtagaaagctagaacctacaatgaatgttcttgctatatgtaatttcgatatgaaattcatatatgcatatgtcggtgtacctggtagagcacatgatacaaaggttttgaattattgtgcgacgaatgaaccttatttctcacatccgcctaatgggaagtattatcttgttgactccggatatcccaccaggactgggtatcttggtccacatcgtaggatgcgatatcatcttggtcagtttggtagaggaggaccaccagtaactgcacgagagttgttcaaccgaaagcattcaggtttgcgatctgtgattgagaggacatttggagtatggaaagcaaaatggaggattgtagatcgtaagcatccaaaatatggtctggctaagtggattaagattgtaacagcgacaatggcactacacaattttataagggattcacatcgggaagatcatgattttttacaatggcaaagcatagaagaatatcatgttgatgatgaagaagaagaagaagaagaagaaggagaagaagaagaagaaggagaagaagaagaaggagaaggagaagaagaagaagaacatgttgcatatgagcctaccggtgacagagcgatggaagctttacgtgacaacatcacgaacgaatgtaataaaagtcgcttaccttattagatatgttttttttattgacttggtttattgttataattatgcttacgactttgtctatcttttttgcttataacgtggtgtactactttattgttataattatgcttatgatttctcacaaaatttaaaactaacgcagcggcggcgaaacgaacatagagacttgcggcagcggcaacagcagcgacatccaaacgaacataaataaagcgtcagcggcagcggtagcggcagcggcagcgacaacgaaacgaacaacaagctgcggtagagtttcccgccgccgctgccgctgccgcctgcggtgaacaaacgaacagactaaacataaaaggatcattagcgattatgggtgctaaaccaatataatagctggccttcaaaagtgggtgaatccgtcactaccaaggtacttagtcgatttcgtacactcttatcaatcagttttacttatttcttttccaagttctcggttcttttataggaatattgcaacaaaaataaatgaaaatttgaagaagaaataagttttttttgtgtgcagagaagtagaaataagtgaaactattttatcacaacaaaaccattttaaaacaatcagagattgataaaaagttcaaagcccagaaacaaaaacaaaactacaaattgtgaaactcttattaatctgacaaaacaaaaactaagtacctggtctctagatcgaattcgagcagcaacaagagttcgaagccccaatctcagaagacagaacccttttcatataataaatcacaaaagcaaagtgggttggtttagtgacagttggtttgattcgatttactagatttgattggttgacacattatagttggttcaattcgatatgagattcgaattctagacctgtaccatttactattcctctagatttagaccataaaccggcagttttcattttcaaaactcgaaattgatcaataattagaagattttttttgtagatccgaataaaattgaggaatattatattgtttatttcttaacctctagcgttctaaaaattcaaaacagttaacgacagctcctgcgacaactgtgcagtgacaaaaaaaagaaaaaaaaagagttaacaaattattgcccctctttctctatctctcttcttctcggtttctccgtaagcattcagagttctgcaagtaaggttagtctctgtttctgtttcttttcctcattaatctaaatgcttcaaaaacaacatgatagtgaaatcgaatctaggtcttgtaaatgcatattgaattcgctctctttccatttttaaaatcttgattataatctagtaattgaattttgatctgtcaaagcagagaagaaggaagctatggatgtagagcaaaagaaaccgttaatcgaatcatcagatcgtaatctacctgatttcaaaaaatcagtgaagcttaaatatgtgaagctt

SEQ ID NO: 287 - DNA, 95167 bp, Arabidopsis thaliana
gaattcgctctctttccatttttaaaatcttgattataatctagtaattgaattttgatctgtcaaagcagagaagaaggaagctatggatgtagagcaaaagaaaccgttaatcgaatcatcagatcgtaatctacctgatttcaaaaaatcagtgaagcttaaatatgtgaagcttggttaccattaccttatcactcatggaatgtaccttttcctctccccattagtacttgtaatcgctgcacagatttcaactttctctgtcaccgatcttcgtagcctctgggagcatcttcagtacaatcttatctcagtggttgtttgttctatgctgcttgttttcttaatgactatttacttcatgactcgaccacgtcctgtctacttggtgaacttctcgtgctttaaacccgatgagtcacgaaaatgcactaaaaagatctttatggatcgttctaaactcactggctctttcacagaggagaatcttgagttccagcgtaagattctacaacgttcggggctcggggaatcgacttacttacccgaggctgtacttaatgttccgcctaacccgtgtatgaaagaagctcgaaaagaggccgagactgttatgtttggagctattgatgagcttcttgcgaagacgaatgtgaacccgaaggatattgggatcttgattgttaactgtagtttgtttaacccgacaccttcgttatctgctatggttgttaatcactataagctccgcgggaatatacttagttacaacttgggaggaatgggttgcagtgctggtttgatttctattgatcttgctaaacatcttcttcactctattcccaacacttatgcaatggtgattagtatggagaacattacgttgaactggtatttcgggaatgaccggtcgaagcttgtttctaattgtctgtttagaatgggaggtgcagcgattcttctttcgaacaaaagatgggacagaagaagatcgaaatatgagcttgttgatacggttaggactcacaagggagctgatgataagtgttttggttgcataactcaagaagaggattccgcaagtaagattggtgttaccttgtcgaaagaacttatggctgttgcgggtgatgctctaaagacaaatattacgacgttaggaccactggttttaccgacatctgaacagcttctgttctttgcaacgttagtgggaagaaaactcttcaagatgaagatcaagccttacatcccagacttcaaactagcgtttgagcatttctgcatccacgcaggagggagagctgttcttgatgaattggagaagaacttgaaactcacagagtggcatatggagccctcgaggatgacactctaccgttttggtaacacgtccagttcttctttgtggtatgaattagcatatagtgaggccaaaggaaggatcaagaaaggtgatagaatttggcagatagcttttggttcggggttcaagtgcaacagctcggtttggagagcggtaaggtcggtaaaccctaagaaagagaagaacccatggatggatgaaattcatgagttcccagttgaagtccccaaggtctccacaatctagaaaccacttagtggcaaattttcagaagaggtttttgagttttcagcttttgatattttgtgtcttcccagtgaatttacctttttcttgatttgataatcagatacaccaaactggttaacaatatttttcttcttttttgcggaaaaacttgttgtagtcagtagcagaccgtcaatggtcggtccagcttgtgtttttggttgttgtgtctgcatatatatttcctttaagcattctttgtctctttcattttttgacaaagttgttaaaaacaagagttatcaacttgtcattaataacaataggtgatagaatgtggcagagagtttctatggttgttaagaatcagttgcaaagatgagatgatctccatctcttataacatctacatcatcaatctctgcattgttgtctttgttcataactttggtagcaacaataccaaacttgttggaacccaattctagcaactccttgaaactcccaggaagcagtaccagcttcccggctatgtcatctttctctgcacaactaatcgtcactctcaccgggtttccagttctgccttcatctaccgtagctagcccgttcttgggtacgctttgatttgctaatataccaaacaacgagttatcgaagttgttagttttacgtcttgctcttgtttctcgaatcctgaaagacacttctcttgatgcaggacggatgttgggttcactagtgaatcttccgaggaaccggatcccggttttgagtataggtaccgaagaacttgtctcgatatgcactctcctctcatgtaacttttctcggaataaggctttaatatcctcatgcccttgttgctcagcaagatccctcggcgtccaaccatgcatatcctgcttgttaacatccgcaccttgctccagaagatactttaccatctcaatgttctcttcgcatacagcggtatggagcgcagaggtgcctgtggctctaggacgagtaacgtctccaccatgaagaacaatttcttttagtagtttcaagtttccttgctcagccgccgtgcaagcaaaatgacccacatcccctgcgtctatggtactgccatgttctaacagtacctttacaactttctcatgcccttccaccattgcttcccacagtggtacactcccttccgcgtctgcgtttacatttcgaagaaaccaagaagctcaatacttcagaagaaatcctgaaatcaaaagggaagtaccagaactgaacaagcaagtacctctgcaattggggtctgcgtggtactccaacagaagaagaacacaatttagagttccttttgatgctgctatatgctgtttccagaaaaaaaaaagagatcataagttatagtctccaagagcttggatgagaagaaaataacagaacaagaatgtgaacttgactgaccagaggtgttctgccattgttatccgattcatttggatcaagtcctctctttagtaactgatgtaaaagtaaatcgtcttctcttattgcagcaaagcataaattgagaggaagatccattttaccccgtgcaagcatgttttctatctccagcagaacattcgtcatcaccggatcattcatttctttcaaatgctgctctccacaaagaaagagagtgagaacaagtaagtaatagttcatagatacttttctgttttcaatatttgaaaacctcagaaggatctgtttattcacctgaagtagattattcatgattatggtaccatcaccaacattggcctgaataatattcaagaaagttgtacggttcatacgcaacagttggcacaaacgtttggtcctcacagtaaacagttgtggtctgtagcataacacccctatctcccctataatgtctccagctttaacctctctcacaatctgaaattctccataaacttctctttgtgaatgcttagttacatcataactccaagatcacaggtatggagacaaaagggataaacataaaataagaaacatccatcaagtgacgcgacttacgctttctgttccagtatctacatccaccaagtcctgcatcataacggatatgtaagagaagtaagttttatgtcaactcaacaaatctgtagagaactttgtaatgttttattaccgcggttccgttcacaaggatgtagaagtctgttggcgcttcgttctgcaagataacatcttcttttggtgggaaatactcagctttcatttctgagacctgtaaaatgtacaaagtagtggtagcttcatttgtgtgttgaaaatgggatatgaatgatgttttcacatgcattgtcattagtataccagttgaaaaagcaggtcattggatactcctcgaaacaggtagactttatccatgagggagtagaaaagaaagtgtgatatactcgatctaatggcctttgggagtgcatcaagagtttcttgctgttgcagaccctcagagtcagtccggtatttcaaacataaatgtgcaagcatttgatcttgcagacgaggtggtaaatggtttctatgagcaaaatttgaagcagcttggattgtatctctctgcaaaatgagaacaaaatattataaaccgcgatggatatgcttcaaagattgaagatggatatgaagatgctaacttacaaaatttctagtccgacttgttccatggactaccaaatttgtcatgttaccaatcaagtaagcggttaatccgaggttgaagagcatatagaagatatcaaatatcatctcctttgtgttcacaggatgcagatcaccataaccaacagtggttagagtagtgatggaccaatacatggaagtcacatatctcatccacaagctttcctctaggaagtttgctacatttgcaccaatccaggtctttgcggggttagaattgcgcgctgcgataaggtaatagaaacatgcagcacaatgaaccgcaaaaagagtgacctgcaaaaatgctctggttggttagtatctacactattactacatcgagagtgtagtagtttgaataaagataacattataagaagcaaaacattttgatgttcttacacaaacgagttttgcgcatcggacccaaaagtagttgaagttgcggtctttctctagtctgttaaacagagaatgtcaagattaaagaaaataatgaaagaaagaagaaaagtttagtgattctaacctggcaaacaaggcaccgactctgcgaagacgccaaagacgaagcatgttaaacaatccataagactgagatgagattctcatagcagcctctgagggaatggttgaaacaagatcaagaaggaaccaagaacgcaagtacttaaatgcaatctgtttacggtcatcaacaatgaggtaagtcgatttatcgaggtaaccaacaaagaatgtcatgatgatatcgatggcgaagaatgcgttcacaatgttatcggtgatagatagtggtggccttggctttctcaagaacccaaactcgaaaggcgaaacccaagctgtgtaaaccacaagaaccactaggaaagcctcccatatcctgtagtcaacatttccatttcagtcatattcaataatctagtacattttctacatgtagttgaacatatctcttaagttactgcatgaatatatccaagtaagtctcatatttaatttatcagtactttgtgtttcaatagtatgttactatttgatgacgctattgaggatacaacaaccaagtacagttttttctacttttggttatagtaatatatcagatttgatatcagtcgttgaaatcaagtaatgagtgccttgaatgttccacattctctttttcaattactataaattatccccaaaaagcaaaagccaaaagcaaaggcggcttttaagctaattagccaacgagagtaataatgggagccttgaatattctacaatagccttcacatttatagatcttcttttttgaatattagggaactaggatttgaatattccaaatgttgagtaaaaagggagctttagtcgtcaagtagttaaaattttcaaattaacctaagaaaatattattattaaaaatcaattgttgttgaggtaaaaaaacgtggaaaccaacatttttgtgttgtttgaccaactagcattttttatttgcacgtaatttttttattttatgaagaaattaaaacatttttcaaataaaatagtccaataagataaaataacatgttatttgtttaaaaccaacatgaaactcttactattttgagggtaaacttgtaacctaaccaaatagttattcacctaactcatagaaaataaggttagttaatctagtgcatatacttaatagtatttacccacaataaattacaaaagttgatcaccaaccattaaaaagaatacaatttttttttatattcagtattcatttaataaaatacaaatttgttaactatgatcctaaagtaaagttaatttcttgtttccgatcctcataaatgaaagaatcagaagttatatagttgaaatatatatcaagttaaaatggtaatcgtcttcttagcttgacatggaagagaaacaagaaaaacaaaaaacaaaagagtgaaacctgtatttgtgatcataaggagatacaacgaatctcctaagcttaactcgtcgattacttcttgcaccaagtgaaggtaaaattccagtagaaagactaaaatgactactctctctcgaaagctgttcaatctcatcttggacttgtccgcataacaaagcccctcctctcatcaccgacgtttttttttcttggcttcctctttgatggttccttttttttgttcttttggtttcggcaaaagaggcaaaataagcagcttaactcttggctttattggtttcacatttttttttcactcgttgttgatgagtgagaccttttttttttctttataacaaaaaaaaactcttggctagttggctttattacgggtgtgtgtgtcatttctgactttggatcccttcactttcaaggaattaagttttctctcggcaacacagtggttggccccactttcacgtcttaacccttactgtagcattaatggtggcttctccatttcaagataaaataaaatatcattcttgctcataaataattgtattaacagaagaagaaaaattagaccgaagaggaagagttgaccaaaaatttatacatcagagcatgatctcaagtttttcaatcattatacttactattttattgtttgtttgacttctaactaaaggaaaaaaaaaacacatatagatgtaggacacgacttaaaacttgttttaaaatattttaggtgatcgatcatataacattcttgggctcatttgtggtatggagatttgaagtgagatattgattgcaacttatggtatgattggttgcatacttgcataaagagcaataaatgttaaactgtcatacttttattttaacgagtaaaggaaaagcaaatcgtaaaaaaatagtttttctttgtttgggcataaaagaaaaatattttggttcatcatccctagatcgtaagcccttttgttcaccttttcctcgtctatcttactcacttcttgtccatcatcgtatatatagggaatttaagataagctagacatttagcctttaggatatgataactaccattgtttggggaggaagctacttaggatttaagtagataatgtaaaatgatgagggataataatgaactttggataactatccattttcttgaaagagaagtaatgtgatggataatcatcacatttataacagttacctcattaaagtggtcttattactacaaatatttgttgctattttttccttcaagttctggatttctcaaatttcatatagttaaagttttaatttacaagatgtctactgctatagataaatcataaaggtttgattgctatgtcgctaggggaggaagatgaccttttaaatatatttgatctacttcaatattgctctagtgaaaagagtgttgtgagtttgataggaagaattcgtaaatcggattgccaaatgatggagctaatcctagataagccaaggaactggcaaaagtatgaaatcatcatagagatggctatttcctatagagaatgttagatgcgtaacaaccaattttcttttacttttagaattttctttatttactaatatttcagttagaggttagcacacttcttgttccatcccataactgttcgggtgtttccaaattcctatcttatataggaatgtattctcaatatgggacaagttggtatttccaaatagaaactggaggggttccctaagtcctgattgtgacaaatacaactagtatatatatatatatatatatatatatatatataatattctaaaaacttaattgatttaatttatgtttagttgttctaaaatggattatgtttctttgttttttcaagttttaacttttcactatataacacactttatcattttttcttgtttggaaaatatttatgctagataaattgaaaacatgttaattatagagcaagagtttatattttattttattgtaacaggttctaagacctttttttatagaaaacattaaattaagataattattaattacatgactcgcgctctgaccagttggaccaaatatatatgaaacacaaatttagtttaatagtattttagagtatttctctctttttttttatgagctggtatttctctaatttacaagtgtgttgcatataaaacttcattccttttttccttttgtatcattgtatgggtctttgactcttttttgggtcctttttcgtcgaccattagcgtctccactttacctcctttgtttccactcacaattgtaactacatgggccacactggcccatatacattcatccaatcgggctatcatcatgtactaagcccaactcttttgaccggtgatcaaacagttatgatcaattaactccaattccttcgtatcccaaaactcgtgcctttgtaaattatccaatacgtaaaataaacaaagaataaatattatttctaaaaaagatatgcttcaacaaaaaaaatttaaaattggatattccaaaaacaaaaccacgaatattcttcatttaataaaataaaacactaatattaatattatcaaaccaccatcaatcctgtaaccaattttcacttttgattgttcttccttattctcagctaaccatgaagttcggcaagagcctaagcaaccagatcgaagaaactttacctgaatggcgcgacaaattcctctcatacaaagaactcaagaagaagctcaagcttatggagccacgaagcgtcgagaatcgtccaaataaacgttcgagatccgattccaattctgtcgacacagatccaacggttggtatgaccaaggaagagcttgatttcattagtcttcttgaagatgagcttgagaaattcaattccttcttcgttgagcaagaggaagagtatatcattagattgaaggtaaatcctcaaaaatttatgtggaacgatgcaaaaacttaggttttgatgtagaattgttaggtttgatgatttgggatcaatttgttagttttgattgcatttactgattgttgattccaattcataggattctaagatttttcataagtagatgttgttggaattactattatgacgaatgactccggccaaatttccggtgaagtccgtcaccggaatgaccggagcttggattcctcgtaaatcatctgaattagtagtttcgattcgtttggaaacgtagttgaatgagaaatgagcatagttagttaaaaatttaggtccatgttacttattttgtagcctaaggctagaattattgcgtggagcatttttagtttacatagtgtattcaactctatttcttggtgggaattggtatcgtaggaattgaaggaccaagtggcgaaagcgaagaattctaatgaagagatgataaatataaagaaagagattgttgattttcatggagaaatggttttgttgatgaattatagtgctcttaactatacaggtaaacttttctttctcatgtcatctccatggttattgtttttcgttcttttctcatatgttctaatcattcgtagcccgaaagccgacgttgagtaaacagaacaagctcacatgttggacaattgatagtttttagatgttaaaactcgtttacaaggtcaagctctagtttttagcatttcctagtaagtgaaaccgtgtcaatgggcaatatttttagaagttttgtgaaagattgattagtagggaacttgagttagtattaacattacgtctatgttaagagtcatattctccacgatctttgtgttacttgttaaatagaaatgtgcccacatgaaggaatatgctgtaatttgtttaactggccactcatcgcagatgctttctttatacttttttcttataaataacttgaggtttatgcctttattcttattcgctaaatgtgtagaattgtgttctattggtttacaggattggcaaagattctcaaaaagtatgacaaaagaaccggtgctttaatccgtttaccatttatccaaaaggttttgcaagaacctttcttcacaactgacctactcaacacatttgtgaaagagtgcgaggctatgctggaccgcctctttccgtctaacaaaagtcggaatctggatgaagaaggagagccgacaacttctggaatggtcaagacaggaacggacgattctgaacttcttagagtaccaaaagaactgtctgagattgagtacatggagagcttgtatatgaagagcactgtgtcggcattaaaagtattaaaggaaatccgcagtggtagctcaacagttagcgtcttctcgttgccaccgttaccggcaagtggattagaagatgattcatggaagaagaaagttggtgtccttgaacaagtagcgaaatgaattatgagtattattatttttaaatctctctttttttttgtactttctttaaatagtacaagtaattgtatacgcttacagctgtaaaagatgaatcaaataaaacatagaagtgtgatcatctttcaacatttaaacttggttgcgtgtactttttcttttgctgcatatcatgtatgaaaaatcttctgtaagactgtaacaccactttcaagcagagagaacaatgaaatacatacgccatttcgaaatcttatgtattgcattttagcatctgtgggtcaatcggtctctgtactcctaactaggtgatatttggtccaatttaagggcagctcattcaatcacaaagaatcaaatatgttgcagaggaaactgttctgacttctgtgaatgttgcaagattgtatagctgcttcttgttcggcccttttatatgggctttgtaatatatgggccttttttatgtgggcttagataaggcttcgacaaattttagactacgctttgcgtccctaagtgcggccactcagtaaatcatctacgtcacttattgatcaaactatggctgggcagtgggcaaaacaaacgaaccagaaatcctaattttgtgtacttcaaaaatcaccattttttttttttttttttttactattataacaatactttttgagatcaccaattttcttattttataactaattaattctttcaagaaatatttaattcacttttttatatattttaactaaaaaagactagaagttattactttttctttttgacccatactattaaaaatataactgtcactgaatcggctctaaatctcctcgactttcaactcctacagacattcagacatgtgcaacactcaacgcactgtcgatattacatagacccgaaataaaagctccttgtccaaaaacttcattcaccctctcatcgttatcttcatttggaaacaactaaacaatattctgttttattaatattttcgcctatttaaaaattcaattagaatagtgtatccctcttctctattccttcaagccaactaaaactacattgcgtgacttcttctgtaaccatttttctattccgatcaaaccatggcgtatttagctccgatttcttcatccttatccatattcaagaatccccaactctcaagattccaattttcttcttcctcaccgaacccacttttccttcgacctaggattcagattctgagtatgaccatgaacaagtcgccgtctttagtggtggttgcggctactactgcggcagagaagcagaagaagaggtatcctggagaatcaaagggttttgtggaggagatgaggtttgtggctatgagacttcatactaaagatcaagctaaggaaggtgagaaagagactaaatctattgaggaacgtcctgttgctaaatgggaacctactgttgaaggttacttgaggtttcttgtggatagtaaattggtttatgatactcttgaactgattattcaagactccaatttcccaacttgtgagttttttttttctccttcttatcttcttgttatgggttgattggtaatctttagaaaaatttgaagtgatttggagtgtttttagatcttagtagtatctacccttttgataaagatggttcctttgcttcatttcttatcatgtctggattttgattcattcagattctattggctacttaggtttttgtaactattggattgagttggttatagacttatagtgatggtttgatatgaattgaagtactcttaggatggtaatctattaataggttgaagtgatttaatcttagtatctacccatttgataaaaatcattcctttgcctcatttcttatgttgttttggatttgaatcgttcagagttttttgacaactcagttatttactcttggattgagttgttggttgtggtgttttgtatgaatggtggatttaaggttgattatatgtacaacttgtgaaatctaactgaatgttaccggagttttggactttcaatcttaacgttatctcttattcttgattagctcgtaattaaaaactgagtttgcttatgtattggaaaaagatctttatgcaaaagtaggtctttttttcttgtgtaatcatctcatgatctaattctgcatactgttttttatatagatgccgagttcaagaacacggggctggaaagagcggagaaattatccacggatttggagtggttcaaggaacaaggttacgagattccagaaccaacagctcctggtaaaacatattctcaatatttaaaggaattagcagagaaggatcctcaagcattcatttgtcacttctacaacatctactttgctcatagtgctggtggacgaatgattggcagaaaggtaaaaactttgtgcactaaaaccatttggaaaattagctttgaattttttctgaaagcacaccatattttgcaggtggcagagcggatactcgataataaagaactcgagttctacaaatgggacggcgaactttctcaattgttgcagaacgttagggagaaactgaacaaggttgcagaggagtggactagagaagaaaagaatcattgtttggaagagactgagaaatcgttcaagtattctggtgagatacttcgtctcatattgtcctgatttggtgcgcagtgtctctagatatctcaatacgtcttgtggcaactaaaatgatgcacattgtttatattcctgtattatattaatcatcttctacatgtattaaactcttctttgcttcaaagctgttactaagttcaaggttcaaattaataacttttctgccgttttatagctcaaatacaagttcaatgatcagtgtacatctgatatagccagaggactgactcttctatatatgttggatagaattctgtgaacttttgacatctttatggttggtctataaatggtgatgattcactgtacctatatgggaagtgcttttattgggactctgggtactttggtcactaatatggtgggcctaagaagagtcaatgaagcatcaacaacatgtttactagttagaactgatcattgatatgcatcacagaaatataccaaaaaaattgagtacatattacaaggagaaacaaacatgactgaccaaatttggcaacttataaactaaatgtttttctctgcaaatacctattgctcatcttccttatattcctcaacttgtatggcatcttattaccatttgtcggtaagtccaatgtctttcactccttggtgcaatgtgcatctgtcccatgctggctacacttactatatccaacgcttttaagaaaatcacgtatctctttcgagctactattgcttgccgtgagcaatctctcatcttcctcatagattagataaggagcttctgctggtttccctgaaagcaacttcttcgcaccctttaaaacgtggtattcccaaccttgaacgtcgatcttgataagaagaacaggttgagaaggtggaattagtttatcaagaggtatggatttgacttgcactgctatctctttgttggacttgaatgcaagccttgctcccacctccgaaaccgcgctattgtcaagccgtcctaccaactgtatcaacaacaatggcatccacatttagctagacccaataaacaagataggtcctagtacagtaaaaccaagttaaacattcagtttcacctaagcagattaggcctatgcacaaaagatacatctttgtatactttttcgacactatcaaacacgaaaatcgttccacattgcgacttttcggcttcattatcactatagcatcaataagaagcaagagaatcatttactctatgctaatctatctataaacagaaaccaaaaaactctgtttgagtgttttcactaaactaatctcaagttttatagaaatgcgatgataccttatggaaggtaatatcccctgttctgtcagaagcagcagcttcaaacacagtaaccaaagaagcaactctattaaaccaaatcccatcacaaatcctctgtaaattctcaaaaacaggctcaaaggcaagaactttaaaccccataaccgcagcagcaaagctagccataccaacattagctccaacatcaacaacaatcccatttttaccactagctctcatactatccaatacctcctgaatcgttgcggagatatctggtttcctaaagggcttacctttaagtagcctaacaatgttcttatgtggtttctccgggagattaccgagatcagcgagagagtaaacaaaagggtacttgagattttcgacgacgtttgcgattatgggttttgattgtggacatttgaagcaatcaaaaggagggatagggtatggggaattgatggagagatttggattggagtattggagagaggagttagagaagaagaagaagagagaagagaggaagataatggaaaggacaagaagtgagattagtgtctttggtgataaaagtttttggttcttgtcttttttccaggcgctcgccatggaaatggatctagatgtgttgttcagagtcttgagttaaaattgggtagcttttgaaatttcagatctggggaaacaagaaggagagatcttgggtgggaaaagatggattcgtaccgacttgttaaagaaaaacaaggagaaagaagatccgaggttagcaatttcagtgagcagagagacacaaactgacaaaagtgtgtcattactagaattaatgacaccaattaagtaaaactatttattctcacaaaattcatttctacaattttatttatacttttaaaactaaaaattaattatacgaattcaaaaataacatgtaatataatttatttttgctatcatcagatttataaattttgacaaatcttttgttaaattgaaacctcgccgaagagaattttaaaaatctagtgaatttgactatcaaaactattataatattccttttactgttataacaatattttttgagatctagtgaatcgattttttttttattttttactattataacaatattttttgagaccgtcaattttcttcttttataaataattaatttttttaagaaatatttaattcactttttatatatttgattgaacacatatacttgaaaagattaaactttattattttttgactcatactattaaaagtataattgtcactaaatgagctctaaatctcctctactttcaaccagtatagtatatattcatacatgtgcaacactcaacacactagagaggtttgcaatttcagtgaagacaagagctttacacaagtccaatagagagacacaatcacacgctgtgtctacaaagggacggtactagaattaactcaaatcaagtatttacttactagagtccgtttaacaaaatttaagggtaaattgagtttttttttatatctaaaatatttttgtaagaataaaatactgtataggttttgtacaaaagaaaattttctaactagctaatttctacaattagtttttaccattaattatacaaattttaaaataatatgcaataaaacattttttgttatcgtcaaatttgtaaaattttgacaataatgtgttatattaaaaccctcacgagaaattcaactatacttctagaattttaaaaatatattgaatttgaatgtaaaaacgttataatatatatatataagttatattacgtattagttttaaatttatatttttttggagatagagggtaaagttgcaaaccaaacagataaccttagaattgtagcttttcaattatttgtatatcggtgatctaaagtaactgtttcaactgtcttatgcacgggctgggcctgctacttataacattttttgacgataaacgattttcgaccataaatatattaaagaaccggctcatgagttttacagttttttggtgaatcaaatgcacgatcctacctagtgagcttgcagggaaactctaaaacaaatataatgttcattaagctattaaatagaattttggtacacatcgtcttcataactcgcttctaatgaaagatcctactctttaaaatgcaagtttaccttccaaatcaacgataaagatggatttattccggtcaaaattaatctagatctttcaacacttttctacaacttttaagaccatctttaattttgcaagatgttctccacagttctacaatgttccggacactagatcacaaaggtaaagagatatgaaatagctaaaggcctaaatgtggatctcatcttctcgacctactaaagcataaaacctaaaagattaatcgaaaaaaaaaggagattaatcggatcgcgacaggacgtaaccagaaaattaaaagtatacttcgttaaataattatttttcacgatgcaaaaaaaaagagtgaataacataaacggtaaagacacaatatttgagaccgggaggaatctaaaaacaagccaattgcttaatatacaagaaacataattggaaagcgacattgttgcaagataatattgtacacaagacaattattgcaaaacaaaattcagcagtcttcaactgaaaatcccttgccattttccttctctactgagtctttacccttcgttggcttaaaccacaaggcacatatgatatagacaacgaagttaattccactgagaatgactaaaagccaataaaagtaatcgagtcggccgtggttaatgttatcagccagccatcctacatcagtagaagttgaagtgaccctcttgacgattgagaccaagaaactgctgacaaagaaacctagtgataaagtggtcaagaagagtccagtgctcatagttttcattcccttaggcgattgtgttatgaagaaatcaagttggccagtgtagataaaggcttccccagctcctactaagaagaattgtggaacaagtaaaaacacacttataggcaatgttttttgtgaactagatttcgcaacggataaacgcttttgctctactagagctgcagctgccattccagcggttgataagaccaatccaatagctattctttgtaggctagagaaacctgaaatgttaatgcatgtgaatatatagctgagagacatatatgaaaaaagaatagatatatgaatctatgaatcttatgtcacctggttttcctttccatttcttccaaaaaggcattatggcacggtcgtagacagctagagttatgagaatagccgcaacgaaaaacacggtgagggaaccagctgggatcttaaagcttccaatgttacgtctcatagttgaagcttgctcaacagagaatgtaatcatttgggcatatgttgtccaaaaaattatagttgttgcccaaataggcaaaagcctaaccatcatttttacttcctcaactttggtcactgagcttagcttccaagggtttgggattgcaactccatcaagggtttgttcaaaatctccttctgcaactatggccgccttgtccaacaagctacacacaagattttattagatacaaaatttactttaatttacttcctctttgtaaagattgaactgagaaactcactgaaactgatcagtatgttcaattctaatgccttcagggttatcttcataaagataaacaatgctttgaggtagttccattttcctctttcggaacgcagctgctatgacctgaaatatttgcacaacgggacttccttggctcttcttataacggtatctcttagtcccacacaagaatattacaatagctatagccatagagacagtgcagattccataagcccaagatcttcccacttcatcttgcatgtaaactaaaacagtcacagccaataatgtccccatactaataaagaagaagaacctgcatgtgccaattaaaattttatttgaaaaagggaacactataacaatgttataattccatgcatgaaaataaactctaaacctaacctgttgaagaagaaagccatgtgagctttctctttaggatctttgtcatcaaactggtcagacccaaatccagagatactagatttaagaccaccagttccaagggctataaggtaaagcgaaacataaagaattgtcatttggaaggcggtcgcgggtatgcaagcttctccatgatggcatgttggtggacgtagctctggcagcttagttgctaccgctagagcaccagttccctgtatacaagatattaaaaccgtctccaagactccaactaagttaacgaccttagcagatttgatagcgaacattttgtttgattttttctaagtgaatttttttaatagagctctaattgataatttgcttataatagtagttttagaatcggagatcttggagaaaaatacaggttatttattctcttagacgcatctactactagatggtaaaaccaactaatcacaatgacctttttaaaactatatataagattttagatagagtcttaccagagcttgaatggttgagaaaatgccgatggttttgaaacggccgaggaaggagtcagcgagaaaaccaccgagcaagcataggaggaaggaagtgcccatgaaatcagtgacaatgttggcagaggttgaacttgggagatgcattgtctccatcaaatatgttaccaaattcactgctattcccattgttgatagcctctccacaacttctatccctgcaatatatgtttcatttttaatgtgtcaacatttgtagttttgtacatatgttccaagttaattggtgagtccatttcatacatataagtagaataatccttaactagtaagcagccataagctgattaacaagtttgattgttttaaggtaaattaatacgaaaataacatagacctttcattctccaactattaatttggccaacaaaataaaatataaagtattgataaacataaatgaatattcatgataagttatggatgtaacattcaatctttttgtcctttaaaaaagtaaggaagtgaaggagatatattatcagttttaaacttagaagcaacaaaactaaattttggattatccggactaattttaattaagacaactggtactttttgtaagagaatattaaggaacaaaacaagggtttggaggtcggcattttctgctccctaagtagacacgtgaatacagatataaatccagttttcgtttttctctttctaatcaatattgtttttcagaatgattaaattttaaaaaagaaaaaaaaatgttattatgattggataagcgagatggggagccatgtggcgtgttccttttctctttatctttctttcaatcagcgagattcagaacaacgacatttcatatttttatatacaaatatatttatttcaatcatatcatgcatgtgtgagtgtgactgatttgaaaatgagtctcttttgtttctcaccatgtattcacaaattatacaacttatggaatttaaaacttatacgcatgaactacaccctcttgatcaaattaattacgtataagttgtatgtatgtattcactaatgactactctgccaatatgtggatgatagatgtattttcttcatttacagaatattaaataatataaatatatagtagtaatgcatgtcacatgaagtaagaaacgaagattttagtaaaaaaagaaagataaaaaagcatgcagttaaataaagaagaaaaagaagttcgtttttagctataaaaaaagagttcatttttagctaattaactaggacttctgtgaataaatttcacacagattcttattgataatggcataagtatatgtgcacacacaaaaaaaatggcatatctattatgtacatgaggaccaaatgtatatatatatatatatatatatgtcaagtagaaaagaagaagacgaaccaagaatgagagcggcagtgatccaaccaccggttttggatttgtcggcaggtcgtcctttgtagtctacggcatcagccactgtccaactccctttgctctcctgaaaacaacgacgtacgtcaatccaaagttcccgaatcttataaccaatagtttacgagtaagaagaaaaagattatccaaaccatttttttctatatcgccttgatgagagtattcttagtttcttctaagtgtttgtttgctctttgttagccacagaagcaaataatgatggacaggagactgcctttttatagccacaaaatgaatgaaagagggctagcaccgaccttccactatatgtgatttgggacatatcgcaaaaacgtgaaatctttgagataggttcatcacacttttttccccaactttaaaatatttcttaatttatatttcgaaattatttttggctctttttaatttttttctttaattttctattttcttatttgttgtaaattttctcttttatgatgataacttatttattcgacccaaactctgggtcccaaagacacatacatagagcgagaactttggatcatgaaacaacacttgcatatttttccataaaatatttggcgagatcaaataaagattctcaacgaggttcattactattagtttccaactcttattttttttttacttctccactaactattgaaaaacgaaccatatttgatataaatataaatatatatatatatatcttttgcctaaataagaagaagaatagcaatgagatcttttgcctaactaagaagaataggaatgagaacatatagtagaatatgacatatgtttttttttccaaataagaagaatatcgaacatatactagtagaaaagggctttacccgcctaatttggaataatttctggaatgttttggcctttggcctaaacccaaactttccacaaggatgtgatatttgtttccaagaagactcaaaccctggagggtgaaacttataaatttataaccaaaaactagaaggtttactaggcaaatcaagaaataaacaaacaattgatcatggggaagataattcgtaagataagatagaaaaaataattttcatgctaagacattcattaagcaacaacgtagtgttatataatcttgcaacgctcaaacaagattaatccactttcatgacaaataacttcattgatcacttaattagctaaactttgatttgctaactagagcattgaaaacaatgtcacttagtagtccactaattcatactggttaagtaagaaaaaacgtttttgaaatttggtctaacccctttatcaaacacgtttcgagcataacattatattactaagctggatgaaatgataagatcgtcatcacaaatgtagttgaagtcttgtaagtccctcttaaacacttagacaaaacttagaagaaaaagcgtaaacaaatactaggttaaaaattgtctggagcttcttacatagtaataggggtcaaactaggtctatttggcttgatatggatcggatcatatcaaaggaaagtttctgaggtaatttggattgcatggctgttgagaatcactaggaaataatatgagaaatacatgacggaattcggagaaggcacgagaaagttactcaaaagtaatataatgaatatatgcacggagcaaaaatggatgaggtaatgtggaaatgtgcaaaggagccaaatatttctaaaaatcctttaaatgcacggtcgactatttggttttgtttgtcccaattgatattaaaaacaaagtacagatatcaatatgttccatatttgacatttgcttgtattcaaaccaaaaatgaaaacaaaggcaaataaagaggcttgcagacgggaacttgcattcatattaaagatgttcaaataattttccaactactaaaaatatgtaagctttgactctactacattagtgttcttcaaaaaaatcatcccaaatcagattttactctaaatgccgagaccaaaagaaactctcgaaatcaatcaaaaatatgccgaaagagtaccagtcacgccttatacagctttgtgaaaaaaaactaaacaaacaagataattaatgcaagttacggggttcaccaagaaaaaaagaaaaagaaaaaagagagacaaaaatgtacaatgtcttctttttttttgtcgaaatgtacaatgtcttctggagtgttaaatccttgtcgaacatttttactctttttaaatcccaaaactaaatttccctataagctagatagacattacgagctaaagttttgatgttaaatttacaatcttgtcgaacatattttttcttttcaagtcccaaaactaaattccctttaagctagacaacattaaactcccttttattggtatatagctcaaaagttctccggattgaactatcaactatccattcaatatttttttttttcatttggcctcatcgctctatcgtgagtcaagatggagtaaaactctttcgtatgggtttctcgacggtttgtgacgtagtaggtgatggcatgtctacacctgaactttggttcatgccctcattacagtcgtttaacctgaatagaagtatcatgctcttattctggtcatctgtggaggctgttgagttgttcgttcatgtcttgtgatttgcatgtgcaaaatcacctacaagccttcctaatatatatgttaaaatgtgattttttatttatttattggtaaaggctatacacgtaaagatataccagagactattatgatatttctgaattcaaaagataacagtgattgtaatttacattttttgttaaataattaccaaaaaagtaatttgcttgtttttcttttcgcggttcagttaccaaccatccggtaatgattttcccaccaatgctataaacactaggttactatttttatatgctataaatcaattatttatttattgtttacatacacttgttttataggttcgactatattttctattattttccaaataagggtctttttaatagttctgattttgattatgaagacaaaatagtcgttaactttaaaatgaaataaaatttaaatggaaaaaaaaatctcaaacgaaattaaatttaaaataggaaaattttttaatggtgcagatgcaaaactatggttgaatattttgggagatgtgagccacaacaataagctagtgcgtctaatgccccaccaaatatggtgaagcgaaaggcagccgggcctcttgtccgttcctcgcttcattttattttctttgttttgtattttcttgtttttgttttgtttagacggttcgttgtggctacttttgaacctatctatggtttaggattttattgaaatttcgctctaattattcagtcacttttgttatcccctaatggtctggatagacatcattactcgaaatcataatattctaataccaatattaccaaattcacacattcgtatatgttgactcggaagatagaaatctatcgatgtcggtaaccggtttcttcctgtgtgagtttgatctttcgaattgtcgcgatgttgtggaccttgaatccgccggatttaagggttggccactctgtttttgatgatcaacaggttccgagcttatttgccatcttcaatgtacttttttgatcttctcttttgtaattgggctctactgttgtaagccttaggtccatatgcccattttattttttatttgtctaatgaaatatatatttaattgaaaaaagtcgcaaacttataaaacattctagactaatctcgctagaatgtgtctgccaaaaaaataattcactagaatatgtggagcactatgttttttttttttttttttttgatatataacattatctattcttgtcatttagagattcagggtaaaatcatggttaaatacggttggaggactccaactcttttgcctcaacaatatgatcaaatctttcaaccattgcaccaccctaaaaatttcgactactttttagatgttatttatatttcgtataaaaatgcttgacactcgtctacagttacatattaaatgaaaaccaaatttagaaactaacatctatttgtaaagaattacatctcatatcattaatttagattctgaatcaaagtaacattctaaggtgattagttgaaagtttttgcagtgatattcgtttatctcatggttgtgttcatatttggactttttgacatttcttttaacgctctttgaacctatgataaatttgcttatttatctctatttcgttttgcatgttttctttgttttggccgataggcttactaatgaggtatgtttttttttttttttttttttttttgaacaaagacttgtcttcattcattccaatcaaaccaagtataaggaggatgatacaaagatgacaaagtggatgtggattatcaattcctttgtttaatattgaccgtggagaaagattcaataagcagcattacctttgactgtaatgtggatgatcaattcctttgttttctgctaaactactaacaaatataatctcttttttttttttttgtcaaaaacaaatataatctctaaccgtttaatattccgataaaaaagaaagagagagttgtgtagccaaagccgtggagagattctttgggatcttcatgaccaaacttttatttccgttgcttccatcctctttgctctatactagaaaagctctctcacttacttatgctatcacaattcttataacattgactaatttattggtttttttgttttttgtttttgtttcttttacttttacatgtacaaactaaaatcatatgatgctagcgatcattagaaaaaggggtctctctcttagaactagctagattatgtcttacgtacaaagagtagctgacgaagaataacaaggtcgaaaggaagttaacagtctttcccttagggttcaagtggccaaaacattgagaaagggagatttttcttctgttttgctactttatgtttctatatccgatccaatctcaatataatttacttcccatcaaatggtttccactatttttagaataatcaaagaatgtcatggactaggatcacaatacttaacaacccaaatttgtattatcaataatgttggtcttgattttagagatgaccaagcaaaaccggactactagttttgtgtcacttcttctactctatatatcgccatctagttttctatatttaattttacgaaaaataatgatgcatatatatatatggtattattctttcttataaaaacaataacgatatctattttataccgagtgttttataaatacttttaccatttttaattatctgttttttcttctaaaactatctttatacctttatatcgacagcatatgcgatgcggacattcgaaaacgtgtccatctaggaatcacaacgaatgagtagatacaaagtgggatcaccttggcacaaatttttctgattgacttttatatatataaagtggaagtcaaaatcactaagacccatagaaaagaacgagatggacaaatacatataagatagacaatgtatgtaggatgggcgtgaatcgcacctgaaacatgttcacatcatatttggatactatagtttaaaaatataaccaactaaaaataatcttctatcaaaccaataggccacgtatcataggacagtttgttttacaaatatcaaagtcttctactacatgaatcaataccttactagaacaacatctttctacttttataaatataactatgtttttgcccccaaaaaaaaatatatatataattatgttaatttctgaaaaatgtctccagtcaagtgattaacgatccctctttgctgccctctataccccgagtttgacggtttcttttacagctatcaagatcttctacagcatgaaacatattgtaataagtatactgaaacagtgttttggataaatataagtgaaacagtacgcagataatatatgaatttataaagtgtaagtgtggaatatatcatggagaggaagtaagtggcataccgaacacatgcaaaataatatgaaagttgtagggcactttcactcaattataatgtattatgaaagaacaaatgaatttgtaataatagagaggaagcgaatatataaatgaactctgttggatatgcacatttgtataattgtattagttatgatattgatattatcaatggagatatgggtacgcgtgtgactttgtctccaaattctttcttatggcagacttacaaattattagacggtttctcccaactttattggtggtacaaaacaacccatgagaaatatatataaaaaagtggcatatgagaaaaacattaatgattgctacagattacggaaatcgttttaagacttatagattttaaaaaaacactcattagttaaagaactcaaaacaggagaaaaaccaagttgaacacacattagtcgtctactgattgaaacttggttaattttaaaggttgaaagatgtttcaatatttctagaattttgtagttgttagagcaagtttttaacttaagtggatatctggtgtacaataagaacttagagacatagtatcccaatagtacttgtaaaagagttaaaacaaataaatggtaacaaaacttgttgaatattattttaatctagcttctcaaaaaagaaagtatacaatttcaatgtcgtcttaccaatcacgcaaaaaagaaagaatacaatttcaatttcaatgttacaatttgaaacagttttcttcaatcatattagtcatttgtaaagataggtagacccacgaccaattaaacccttctgattaagcaatgcatgtggccaaatgaacaatcattccgaatatctcaaaatggacatcagaaatttggcaggctggcaaaaatctatacgaagagaaaaggagaggcatgagaggaagaatcgagagagagtgtgtttgattgatacatatctttgtttttccactatatttgttcccatgcttaaatttaattaaatgcttgcatctaattatacatgtttgacttctctttttcaaatgttctccactacataataaccttaagatctcttatatgatatgggtgctgtggttgtggccttgtgggcgtccttgtcctaaattggacgaaccctaccatctttaaagaacaatcatttatttgaattatcctcgttatagtgaatgtagatttgtaaatgctcagttacatggatcattgaaatcttgaggtgacagatcctatctacaaactttacacgaaaaatatgttaaattctgggaataaaataaaatgaattataaaaacttactggtttagctttctagcttgaattataaaaatatgttaaaccttgttatcacttacgccaaattgctttctagtttttgtcttcaaattttcatggatctttcgtcgaattttttaagttatctttgtatagatgttgcacttccctttttatgttgtttagctttgtcttaagcttctttatccttgtatttttcgtaactcggagcctttatttggtttgaaaaatgaatgcatacaagtctttgaaaaaataaaaatgaaaaatatgagaagaattttttttgacttttaaactagtttttggttttagtttttcccaaaatctattttgtaccctttcaagattttgaaaaacaaattttcctaaaaaatagggaatctagtttttgagtgttttaacaatttttcaaagaaaatcaaaatctatgttttgggagtttatctctcaaaaaccatcgatcacaattttttattttatttttagatatttttgtaaaaaagaatattatctattaacataaaaaccaaaatctaaacaaattaccattcaagtttttaagaaactaaaatctacaccaaaaacaaaaacaaagaaaatcaaaaactaaaaaccaaaatccaaaaaaaaacattttaaaaactacaaacattcatggcctaaatttccaataagtaaaaaaatcatggcaatcaaaagtattaaggctgattaaatacgagactaataataggaaaacaaaaaagaagctcaagagaagttatgtggtttgtattatacggtttatatattttcgaactctatactcccaagttccaagtgacaaaaatacctttccaaatatgtagaagttgaagaatatcaaacattggattcttgatacgtatgaaaaaaaaaatgattcttttatacgcgatgaacaaacaaaaagtgtgagataattgtttgtgggtcaaacctgaatccaggttcaaggtttgggttaataaatctgctgggccaagattgggaaaaaggtatacaagagatgggcctctaaaacgttaagactacatttcatgggtttgtttattgagctattataagttgttgtactaaaagaagaacaaagtttaagagactagagacagggaatagaagcaaagaagagaaagagtcatagggtaacacccgtccacaagcctaaactatccgttaagaacttaaggtgttagttcaggcaggccctgctcagagaaaagcgggaccctaagcccaattaaagtaaatgtaactcatcgtggcggattaatggtgttgtaagtcgtagaaaatcgttaagagaaaacgtattagtttggaaaaccatccaaatgtatggcctaggaccaagcaagttctcaaacaaacactgtagagctacttttgtaaacggtaaagccatccaaatgtatggcctaggaccaaccaagttcacaagcaaatattgtagagctacttttgtaaacggtggaccggaaacgaccacaccggaaatttgcagaaccggggcatatagaaaagaactactgatagttatctaaaacaccatatgtgtcatcgtcttgcaaagtattgttgtcattggtcaatgcagtcccggtggtaaaacatgttcggccacttgtcacaatggaaagacgtaggctgtcaatacattattcccaaatgacttagtccctctataaatattccactcgctcatttgtttcctttaacctgaaaagttaagaaaatttccgacttaaccaaagaagccgacattcgcagccgaagtgtctttagtttattttttctcttctttctatattagatttcttcctcgtagttttaatattcaaactgattatttagctaaaatactcagatttgaaataacatttttctcatgtaagcacatcagtttctgaatggttttctctagcgcatagtctcttcccgatatcttaaaaaaaaaaatatttgtaaaaaaaaaaaaaaaaaaaaaaagcactcgtaaacataaaattgtaaaccctcctaaataacccaaaatatttaattagtatatgtccgagtgagtttggtcacatgcatgtagtaacacgtgaataaaataatttatttatttagtttattatttttattatttgagtcttatgttaatcacttagcataattacttaattaatttgatattagttaattaataatgcttagttgtaattatccgacgagaatataatatctgctacacaatctcgttttccaacgaacacatactacatccacatttcaaggccaacttctctcttaccggcttccatgacatcgataaagcaacatcatgtactttaatcaataatttgaaagattttatacactcagctattctataagtttgagggcacaacccacaaccacttgaattttttttggaatcgaagacaacaacccaaatgcttcaacaagactagatctcgaagtagtaataggataattatgcaaacgcaaaccacatgagaagaaaatggtgaattctcaaaatgtcttgaggatctacaaaggccaaagaacattatcaatctattttgaaatcacaaatttaaccatgaataaattgcttcaatcacaaaacaacatatcctaattgtagaacaataataatgtaagcttttagacattttgctattgaattgaataaagcaaacataattaatattcattattcatgatggtgctgtactgctgtttcagttcgtttagatactttactattttcagaaataatccagtgattaataaataaacaaaacagaaacccaactaacagaaaaaagaaaaaaaaaacagaaaaatggcaaataatgagtatttgttttgattcaccaaaaatagcattaccaatggaaaatataaacactacaattataatctcataattggaattagtggtaaaatatgtataaaaaaccaggataactcctagtatataaataatttaaagatgaatattcaacggaagtaacgtagcatagagatggaatattcatatgagctaaatatcaaaagaaataaaacagttatattataccttatgctacaagtgccaaggatgtcgattttttttttttttttaatgactatgcaacaaaaaaaccaaaaataaatcgaacaatgtaaaagttacgaccaatggtatacactacttaagatgactgatgtaatagttagtccatctaggaatatatgccatttgtgacacatcatatgtattgattttgattctttcttatcgaacccccctcggtgtcaacacgctagaatcatccctttttctcttaaaacttcttactttcttgtatctattgatttgtctaagcttaatatggataaaatcccaaatgctatcatatccaccatgttttgattttgcttagattgcatataaatcagatccacattattttattttacttagattttcatcaaaaataactatattaactaagagcattcttgatggggatctctaagcctaggtctcataaataaaactaaagtgtaagtatagataaataatattttttaattatggatctcttaaatttgatgaaatctagaccaattgtctcttaggtaagagacaaatttaaaagactcatctattatttaaattatataaatttttattatttgttaagattatttgctaagagcccaccattgtagatgctctaacatactatttctctttaatttgccaacttattaatgaatccaacatttatatctcctcactaattcgaaaaagtgtttttaatcaaatggttattggtccagttttgcagcattttccatcaaaattcaactctatcaaatcaccttacccagcataataaggattgtggtattgttattgatccaaatgatatcataaagaatagtctccttaactaattaaaatatacatcacaaactataaaaaaaaacttacaagaatcaaatcctttgtacgcgggccatgttcatgggttaaggattctacttggtttgtcatctcaatattgtcaatttagtatataaaatggaaggttgcttctcttccaagaaacatatagaattgttgacacaggaaacatcaaatataaaaaagagcagaacaactgagtgaagaaaacacacacacagcgtcctctcgccgcaacccaatttgctttagttacaaacattccttcctcctaaaagcaacctttcttggttacattacgatctaatactttggttttgaaaaaaagtgatttaaaagaattccttttccaattgatttgactatcgacgacacatagtgtagttatcgagttcttacagccaattataaaaatgaaattagatccaaaatagccatatgaaccatttgaccaaataggaagaggaaaataccgtcattaattttttttttttttcaaccactcgtgtttccgttttctttttcctgttctttttgaacttatacaaagtaaaatttctactcatatgacttagaaaaccaaactaccataaaaatgagaattaggtaagtaaaaattactccatctgttcctttttgtttgatcttttagaaaaaaacacaaatattaagaaaatatattaaatattacttttaaatatattgttttttgtgttttacaattttcaataactataaaccaatgatattcactaatttgtattgaagtttacaatttatcaattataactaataactattgtattgaaaatctaaaaaattaatttttttaaaataatttttttttctaaacaattaaacaaaaaggaacagaggcagtattagaaaccctctaacccaacaaaaaatgtaatgtataatgtgttcataaacagcaccaactacccattataattatttcatgaacacaattgtggcagaataataatgatatgtcaaactgattaatgcttaatctttccgatttcagcctgtaaatattgaagtagccgacaacaagaattgaaaatcgcacaaattaggataacgtagaaaaatcatgttcgaaatggtaaaagttatgtaaacttaatttgaaccgagttatgtagaggaagaagaatgaacgtagacatgcctaagtgaatcttggtatgatggcttttgaattattgaagaaaagaagaataaaagtgttagaaagaataaattggcattataataaggaataaattctaagtgaatttagtattatatagtttttttgtaacactttaatactgtccgcgttatggccgccccatatggcccttaagacattaactagaagagaacatacccgggggagtttcatctattttttttggatactaggctatatgtttttttgttttttttttcctttgcgaaaagcctctttatttttactttggtgttaaccaaattccatttgtatatcatctttggttaacaattgtgttttcttgttgctaaataacttttaacatttctataaaaagaaaagaaaattaaagtgttaaagtattgccttacgccaatgtacaatgccgatgtaattatagaaaaatgacaaactgtgtttatatagaaaaataagagaggaaacttattatttacgatattttcactcatgctattttttttttcaaagaaaccaatttttttcttctcaccagataatagctctcgaaaaagagatagtatttagaacactactaatcttttttctatttgttttcactagaaaaatgattgcttagtaacagtctaaaactgtgtatggtaacttttttaatgtcaaatttgttggtccataagaaaaaaattatttccaaaatttaggagaaatgaaggcgctattatacaaaaaatacaagcaacgcatagtagataaggtggtgaagcttatcaaatttggtttaattttgattcttttcacttaattatgttctcattatatggaaagatggtgatgaaatatatgtgtgaaactctaaaatcggtgaatttttcttgttgctcaatttaatctacaagaggttatatgtagactaaattaaaatttcaaaatatatggtttattactttttagataagaaatgtcttaattttatagtttgagttgtactacattgtttttttaacatctataaaagaatgaacatatgttttaatatgattggtaagttgttttgacattttcccatatccacatataactttattaaaagtgatatagtgtacactttgaattcattataagatataatagaaactaaacggataatatgagagatttcgaaatccaacaaggagctaagtgtgaaggaacacgaatgaaggacagaattggaacaaatggttattggggggcaacagaagagaataatacccttcatcatcctcttctcttttatacctacaataatgcaatcgagaatcactttaagccctcaaggacgctctcgttatttccctcctaatgatccttgacgacttttttctccttcacatgaaacagtttcaactttacgttaatcgatatcgaacgtctatttccccgtaatgtttgaacgttgatattaaaactatttttgtaaaaccgtgcatcttaagacaaaacatggtgtccaaaccaaaaatatgtcttacctgatccaaataaattattttcaccctcagaaaattataatgcacaccatccaaattaatgatcatgtcttgaagtcttctagcaccaaggctatttcgtcggaattcatttctttggttttaatttcttttactatatcctcatgttgcaaagaaagttgatggaatcagaatctatctacatatacattctgatcattaatgcctataaaatgacatgtttctcaaacaaccaagttcaccaattcctttcgcttaccagtctcttgtcttctcaggttcgatcatttttttccttcaattttagctccttcttcatcataaggcttttccacaactaaatcattactagatcttgagtaagttggctgagtgctactagttaacttttcaggttgttagagatacatagatagaaatatgagctggaccggaggagattggctatgtggtgcgtgtcagcacgcaaacttcaagaaaagagaatcatgtcaaaaatgcggataccccaaatttggaggggttgatgtgtcaacgtacttgtacaacaggaccgaagttatggctggtgattggtattgtggtgcattgaattgtgggagccacaattacgcgagccgaacaagttgttaccgatgtggaatgatcaaagtcgagtatacggaacagtactatggagctcaaatggttgcttacgggaatgatggcgcagcttgtcctcccggatggaaaactggcgattgggtttgtcctagggtgggatgtggggttcataactacgcaagcagggcagaatgcttcaaatgcaagacaacaagagattatggtgcgtaaatatatatatcctctctttcttcttttaaaatgttattctattgatttcgaacttttgaattgatatattttcctctttttgatctctaggtggcgtctaaatggacgagaaagagctaatgaagaatctcttgttttaattatacctttcaacaagtgtttctactttctaacatgcatgacgctttcttacgttgacttgaaatcaattgaaagtttagactcgtgcaaattaacgtaagtacaaatagttgcaaacaaaattttgaaacaattaaggcatcaatgagaccttattgcaaaaacaatcgagatacatagattattgacgatattttattttttagtacaaatatacgatctttagaggaagaattcactagaaatttaaagcaaatacaaggtatttgcaaatacgaaagttaaattctactctttcgatataccattttgcagaagcaattttaaagtacgctgtaaaaaataaagtaagttttgtatttgatctaacacttgtagctccagcactaacaactattgtgcttctacagtcacaatattaaaaagtatgggcgtaacttacatccgaaatatagttcgaaaatagaaatttgtcacacatttacaaggagcacattgctcaaatataataaagaggaagggacattctccaaagaatttcatgaaaccattctcagatgttttcaagataacacgtgtcttttttattttattttataacatggcatacctacactagataaaaacgaagttagatggcgtttctagtctcctgaggctggtatacatattcccaactactgcaagatgcactatctattcttctctctctctctccctctttcaaattatgaattaagaaatctaaaagaaataaaaaagagaattgaagatagtgttgtaacctgcttagaccatctccaatagtatttcatttttcactttttccttcattttgaaataaaaaatgaaaaaatcttctccaatagtacttcatttttatcttcaaaatgaagatttgaatagtgtatcttcatatttgaaggtatactattcacaattttgaagatgtgaacttttctatttacaaaataatccttaaaattctaacaaaattttattttgcaccaaacaaattatttatttttattttaatccaatcaaactaaaatgcaaaaataaattatttatttttatcttccttttccttatagattatttgtgggagaattatatgtctacaattgtatcataaatatatattttaattaatgttatgtaatgtgattttctttataataatgtattttacataacattaattaaaaagatatatttatgatacaattgtaaaagaagtgggttaaagttataaaagaaatggattaactaatgtataattgtatttgcttattattataaaagaaattggttaaaattcataagtttacaaagtaaagggtattattcataattaataataaaatagagatagaatatatttaagaatattccttttgaagtagaaaatgaaagaaaccattggaaaagtcttgtttcatttttgtcttcaaatttgaagaaattctaattttgaagaaaaatttgaagctaaccattgaagatgcccttaaagagagacgatcgcctttaaccaccactacctggcccaaaccaaggtcactgtaggttcatcgaatcaagctatttttacaaaacttttaagtttcagtctatactatgttcaagaattattattcttacatttttttgttaccatatatagctacgtacatatcaaaaattgtactgtacatagagcatcagcaacatatgaaatatttcacttattgacggatcaatccacgaatgacatcggtcatataaatatcaaacctaatatatatgatccattatatgatttacatgttctgttgattagaatttagaacctatggacttttgagtttttttttctctcttcgacttcattaaagaaaagaaattcatatgtacagatagatttaatataataatagtgtgtgtaatcctataaaatgtaatttaagtaaaaaccaacaaaattgaatatatcaaaattaaaaaaatattgaaaattgagggctattacgtaccatcagactaacataattgacatgtatcagaaactagttttcaattagaagattatttttgtataatcgaattacaaaaatttcagttttcttaaaatgcatgcgagatttgaatttttttatatataaataataagttgatagcccttaattttaaataagttttagaatactataggacaagttttagaactttgtactttttgcaaaaaaaaatccaattcaataaggagatttctccaaaagaaacaaatctaactaatttactaaatccaagatgcttctaaaatgttttttatatagtcatgcaattacatttcattattttctatttagcttttctttgtcatctcgtattataggggactttcttgagttattcattgtaatttctcataaataaatactaaatagggatttgaccatctttgggtcatcggattattctgatactaaggtaaagctggcataggattttattgttcaaacatttataacttttgagtaaacaaaggatagtggtggtgtcagcttggcggagcatgcctgacatgtgcatctcatcaattctcctttatgtttatatccacacttggatctatattgtttatcttcacgcatggttttaactttactacaataatttttaaaaaaatatgtacaaaaataaataaataaaaagacaaaagtgaaaaagagatgtatgtgaagaatatggataaatagtgaagacaagacagttattgtcttgcccttgagacgtatctaatggctaattctagtatcttttacaaagataatgagtccgattatgagagctccaccgtcggaccagactcgagccgccgtacgagttggctgagcagctctttcacggctagccctagttgtagctccatatctcatctaagtaaccatggtctcaacagctataaccaatcaaagcctcacaaagccaaccaagtcgcatgggaagctatggccaggctccgtcggtgctgcggccgtgcggtagggttagaacattttcggcttttaaagaggttgggaagtggtgacatcggaagtgtgtacctctgccaaatacgtggaagtcccgagacggcgttttatgctatgaaagttgtggataaggaagctgttgcggtgaagaaaaagcttggaagggcagagatggagaagaagattttagggatgcttgatcatcctttttgccctacattgtacgcagcttttgaggcttctcattactcttttctcgtcatggagtattgtcccggcggtgatctctacgccgtccgcctccgccaaccgtctaaacgtttcactatctcctccacaaggtcccctttcccacaacactctcttttccttcttttaaccatgcatgattaatcaatctcattgttaataaagatttaattgtgttttcgcttctgtatttaattagtgggttgttttgaatgtgtaccacggcttttttttaatattgttctatatttctattaatctttattttttggtttaattaacttatactaaacttatttactagttgtatgtgttttctgtatttgttaaaatatttaatgaaaaaatgaaaaatatttttaattatagaagatgtgaaattttatcattttttccaccttagtttttggttgaacaatttacatttaatatttgctttcttatccactacgatgttttagacgtaggttctggattgaaaattttcgggtaacaaaataaaccaatctttaattttactagcaacaaatactgatacgtatatagtaataggtctatatagcaattttttttgtttaatagattagcatatctagtaactaattaccaaatgcttaataaactaagatactatgtaggttttacgcagcagaaactctagtggccttagagtatctccacatgatgggaattgtgtatagagacctaaagccagagaacgtgttgatcagagaagatggtcatgtaatgctctcagatttcgatctctccttcaaatgtgacgtcgttccacaattcctcagcgacaacgaccgtgaccgtggccatcaagaagacgatgacgacatcagcattcgccgtaaatgctctacaccttcttgcacgacaactccattaaaccccgtcatctcctgcttctctcccacttctagcagaagaagaaagaagaatgttgttaccacaacaatacacgaaaacgcagctggtactagcgattctgtgaaaagtaacgatgtttcaagaacgttttctcgatcaccttcttcttgttctcgtgtttcaaatggacttcgagacatctctggtggatgtccatcaatatttgccgaaccaatcaatgctcgctctaagtcattcgtgggaacacatgagtacttggcacccgaagtaatctcaggtattttgctaaaacttcaaattatctacgtgaataatcagtgattttttaagttaacaaatagtcaaatacgaaaactcttataaaaataaattaatagaaaatgggtcgttaactaagacacgaagaagaagatgatagctaattttctaacccatataaactatatgaaattgcctcatattgctaactagttagtcttattgatttgtcagggcaagggcatgggagtgcagtagattggtggacttacgggatatttctatacgagatgatatttggtaggacaccgtttaaaggcgataacaacgagaagacgttagtaaacattctgaaagcacccttgacattcccaaaggttatagtgaatagccccaaagagtacgaagatatggtgaatgctcaagatcttattataaaattactggtgaagaaccctaagaagaggttagggagtctcaaaggctctattgagatcaaaagacatgagttttttgaaggtgttaactgggcactaatcaggtcaataaagccaccttgggttcctaaagaagagactagtcacaagactaaaggtgataatcgcagcgttaattattatcttccaccaaggtttatgatgagtaggaaagaaagaaatgagccttaccatgtgtctaattattttgattatttttaactttaggttacatttaaacagattaacagtttttttttcctaaatgacattgtattgtttactactcgtagctttcgacgtttcatttgatttgaggtccatgtgattattatggacgtaagaatgtaaatgattaggtgaaaaaatatatcatttgtgctctatcactatcatgtgatttatcaattggttcttcattttggcttttcaacacacttatatatagtccatacatatatatacgctacattagaattatgttgcaaatattttacgtttatatataggtgatttaccaagtcaaattttctttaagttaataatataaatgcatgcattgatcatttgacctttattattaaatctcatttgtgattgaattaatagcaattgttattaccaaaaacgtattactaccatcaaaatattgtattcaaaataagatcaaacttaaaaaagaagaagtaattgtttgagttattacaatgtgatcagcacatatattatatccttattagttatatagttcaatctatttttattcgaaatgttaacaaattttgttgatttacttaataatcaatcgtatgtcttgtataatacttaaaactagcaacgtgattctttgcaatctagcctctaacaaaggtaataaaaaaccccaccaaaaaaataaaaaaaagtttgtttaaaagtaaaagcggccaaaatttatacaccgaatctacgttacaccggattttcttttaaaatactgacttagttatatatattttgataaatgacaaagagtaaaatctatgtattttacatatctgcacattttaaatgaatcatgtgcaaataagatgcgcactgttgtatataatgtatttgattacgtgtacaataatgatttcacttactagaatcacgaccgaagattttgtatgtggaaacaattatgattcttcctgaaaactaatgatgagaccttatttaattatctatttcatactccttttcgggaagaaaagctaaagtgtttagccaaaaagaaccaatgtaatgatttattgaattagatgactttaatcaattttcctaaggccgaaaaaaagagagaagaaaacttcgaagacaaataaatataagattctttttactttaattgtgagagttgaaaaagaaaatgtacctgcatgcgtagctaactaagctttcaccgctatccattcaattactttgtcacatattaaagtcaaagactcagagtgcttgttatatatattgggatacgaagaacactgaaggtcgagatgacaaaatcagtatatagcaagattctagaagaatattgataaatattaatattagagtttaggaataattataataaaactctcataaaaataatgtcacaatttacattctcttataataacacctttatattttctattatcatcaaatttattatcatatcagagtcttgatccaaatttttatggattaaggttttgttatctttttccgtaaagaaaaaaaaaaaagagacgtgttctgtcttggtcacgtttgtttatgactagtaaattactcatttcgtggagaagaataaataaacttaactacatgaggatttctggattcacaaaaaaaaaagaaggaagaaaaagaaaaagaaaaagaagacgttcatgttatcaaatacaaacaatgatatgagcaagagatacttcgggcaaggaagctaattacgatgcacatgataatgttatttgtgaaaagggctttatgccatgaagttgaggcttaggttcttctatcactcactacaaggaagataaagccgcgaagatgactactaaagtgatgagtccgatgggtacgatgttgatcccaggatgacgaactttttaccatgactattacataagttttttcataaacaagaagtttgaagaacaaccaatacttgtgatttgaaaccagtggagatacataactacaaaagatatattttatgtggttttttattaactacggatatggtggtgaccattttgaccccaccaccggatataaacgtcgatttaaattttacgatcggatataaatatcgttggtttaacgactgcgtcgtatgagattgtccagggatattgggatatagagaaccgaagatcaatcgagatcgacggtcgagatgacattactaaaatatgacaagaaaatatgattctagaaaaatattgataaatgttaatattggaatttaggaagtttatctctaaatatattatttatttttatttttatcctaatttttatataagaaaatgtaattgtaacattattcttatgaaagttttattataattaattttaaatacttttgtgttttttacttttatcaaatttatcaataaaaaataaaattattttcattttgcaatatggagtagattacgaatttcgattgtatgctgtgaatctactagatttgtgctcaataggtaataactctctcgctatacaatcttcactttatctaatatagcgagagagttttttgaaagtgacaaaaaatttaggataaaaagaatattacggatttctttggtgggtttttaagtgacaaaacattgatggtggaaagctggagaaaacggccaaaatcaacctaaactatttacaagcgggttttttatatccaaattctaatgtgtagttgttttctatttgaagtgatcaaatattcaaatttgcaacctaaagttataaacattggaccaaaacttgatagtgttaatcaaccgttattttttttatgactaaacatatattattgtgatgatgtgattttttgcttcaatttttttggagcaacttgttatgtcagcccgtttaatgccgcatcatagcaataatatatgtttagtcatgatatagatttttaaaaaggttttaccgttagtccgttacatacatttagattttttttaattttcaaattatatttagactctttgtgtggcgaatattttgtttggatttataattaatagtaaattaacaaattggtaattgtggcaaccggttatattattagattatatctgacgttatgccgtttaacttgtaatttgtaaactgagggtactttgcaaaaataatgttatttggaagattgttttacagaaaatcattttatttacatataaaaattcctatctttactttatttaacataatatcaggctaatactcttattttacgaatttgcagacacacacagaggcacatagatatgtatatatatttttccttggaattacaaaaaaatgaagatgtacgagacattgaaataagaagttagaaatagattggtttgagtaaataacgtgaagggagttgggaaacggagggaggcacatggcccggcatgtcgtgggagcattaggacaagattaaggaaagacgagatcaacatgtaagggtgaaaatgagcagagtccctaccaaaattcatcttcaatccctaaatccagacatcttttgttcccatgtgcttcttatttaaagttcactgtcccaactcacttctgtctctctctctctctaccccaaatccaatctattgggagaatataaaaaccaaaaacattgacgcaacgtctcggcctctctatttgtctgattgtgcaataactaatttactttttttttttgttttcttcttttttgctttccttttagttttcaatgttttgttctcggaccacatcatctactatgatctaacttgtcggatagtgtttagtttgattataatgtacttgtgttttacaccctaaatactctacgagtacatggaaatttgaataaagtatacatgttcgaatatacggaaaaaactacttcatatacactagtcactagatgtattagggttgagttaatcttattgtaaaaaggaatggttttggatgggttcttattgtagatataaaacgtgaaaactattgataaaaaaatacataagcatgacaaattctctgaactgaactactaagacaagttaataataaactaaacaaataaaagcatggaaaataagtattggatcatagaacatgaaaaacttaagtacttacatcaacctatagacctagagttaatcaacttatactaagcatttaaaagtgtgaagcttcccctttgacaagtaatgaatataaagtattagtctcaagttccagaagttcacaattcgccctaacccactcgtgtggtgctaaaaacaaagtgcttatagaatattcactcgatcgagaattttatcaaccacgtgagtaaaaaaaattgaactaccaaaattagattaattactcctaatctagcattgagctcattctatatgaagggtccataaagattttatcagagggatcagatattaatcatcattttatcctcacctaacttacccaagatccaatttaaagaaaactcacaaataatgtaaaatgacatcacaatggaacggaaaaaacactttacagaaataagaaaaatagaaaggatgagatcaaagcttctttaaatgtattgaggattctaaagttcattctaagataagcatccaaaataaatgagacaaaaatatgtatataccctacattaaaacttgtttctccaagtagtgaaacttgtctatatattgttttcaaagctatccaggtatacctatgacaaaagtggtcaaatcaagtttaaaattgataaaaagctcggatctgtgtgttataagttgattcggctagaccgtaaagtggtattgtcttgtgtttaaatactctatatgaggtgagattctcttgcggttcattacatgagcgtgcatccagcagatgaaagcacatacctagaaggggttaattctagagttctggaacatgaatgttttctaatacagaatgtgatcataatctgctttctattgtttgcccgaccaaaacatgatctaaactctttgaacaatttctatcaatttagccaccatttttaatattttccattgttttcaccagaggactctatgaagataatagactcaaaaacaaagcaaaacatcatgtaagactcttaaggctctcgataggaatgcatgaaaacaacagactaatgtctgtgaaatagtctagaaagtatgcacatcaactcctccaaagttaacccttagcatgtcatcaagcaaaatcaatcaaaggttaggccaagagtagaggtttgaaggttcaactcatagaagaaaagaccaatcaaacttgcaaattaaaggccaagatagagcatattatgcaaaatgagaaaatattctaacaaaattatccaaactcatcaaaatatatttactcataatcaaattcttagtgatcccttttcatgccaaatacacaaacaagctttttcgcgagaaggggaagattgtaagtacacacaaacaagatttgatattccttattcattaatgatcaagtccactattataaaactctaaagacatgaattatgatcctaaattctagtagtttgttctttaagcgaactctagtggaaaagaggacttgttattttattccaaatttcaagaaatcttgtctataagtacacaaaaagatctcactcatcaaataacgaggtaaaaaaagaggtgaaaccatttttttaaaaaagaaattattattcaggtatgcaaagagaggaaaaacagcgtaaagaaaaccaaaatgttttattttaaaatctatgagcatgtgtttcaaaactcttaatgaaatgattatgtttatgttcaagtttaataaaatagagattgagttacataaatgcaactatatactattcgactcagacctaatgtaaaataaaacatgaaaaacaaatgcttgtttgggtctttatttttacgtatttttgtgcaaatgaagttttttaatgatttgcaagtcacaaatatttatagtaataaaaaaaaacacgtatacacttgatacgtacagggacaaccctgaaatttcgaaggacaaagttaaagataaaaaaacttttgaggtttttctaaaggcttaagctgcatgcttgccgttgtatgtatgattttatcaatttgtatgctttagaacaaatcaacataatccaaaggatctaaacgattaaaacttccaatgagaattatgaggaagaaactatacctaacttctagcagagacgagaggcaatatcctagatgagagagagagattcaaggagaagggaaaagctggggtttgtttagtggtgcactaaaatctctgacgaggttcggagacagaggcaacgaaactcggagacaagcagtgagacttaaagaaacgtgtatgcatgtataaaactaaaattaaaaactaacatcgtttagagggtaaaaaagagttaaaagcaaactttaaatgagttagtctatttagtttcagtccaacgtacatgttaaattcacatacttaaacggatcaatgtgattaacccatctactttttataaaatatataaactggtcacgggcccgaattcctatatagaacggtttaggcctgcggactcttaagatcaccacccacactcgaactttggcttcattaaggccaattcttttttaatgaaacatacgtaaatgagttggcatgcaaatatttagatcatgtataccttttttttttgttatgtatatcatgtatacttatcaacactgtctattttctatataattttcaagggacagattgtccccaacattaattttcttctgtttatattaattctttagtttctaagaaaacattacaacgagggggtatagtgtatgtccccattttcatgacaaaaacgaaagaaaaataacttttagagaaatgtggatttgattgtgaactatacgtggaaaattatttgcatatgactattcgtttttcttacagcatcagtgtttgtttattatctttacattataaatatatagatatacatattacatatcggttgaaaaagaatatatatctgtatacatatatggttacatgcatgtatagaccacattgtgaaagtagtaataaaaatatataattacttcttttgtattggcgggatcagagatctaactaaaataagttagaaacattctattatggagaagccaaaaccccacatgggtagttgaaatttataagtatttaattacgtaatattttatttgtttattttttcaatgtctctttatcctcgactaataaaattaagttttttaatctcatatgtatcctgcaattatgccttaaaatcttggtttacaaaaccgtccatagtagcaaataatatctattctcatctcacttcgtatctctttttatgatcttgatagttttcttactaagtaatttttataacgttacaagacaaagaattatttggtctatacaatcacacttgcatagaagtttcaataagattgcataaagaaatcaaaataattaaaacagaaataaaactttcgtatatatttttacagaaaatatgtttcaataagaatgcataaaaaaattaaaagaagaatagagtttagaaaatatcttccattttatatgattttgaaatctttgatgaaatttagaaaataaagtttcaaaaaatgtataaaagttataaatgttaagtttaaacaatgaccttaaaaatctatatataagttttaaaaaacgtgtattgactaataatgcaatcaaggaaatcttccgtggtaacttctggaaacttcaaaacttcaaactattagacttcttgttgggcagtgaacggtgttgatcgacactaagagagttacggtcgacactcttgccttggttagaatccgaatttgtccttcaaacttgatttcttcgatttagcttcagaatattccataaactttcaatgtatccctaaagtgcaaaaacctgaaaaaaactagaaaaaactctagaaaaaaaaaaaaactctaaaacctatatctaaatcatacctaaaatcgaagaaaatcgaggtatatcagaatagacgaacaactataaattgagagtcggttttaatttcatctactacctcaagtgtggaatatgaaagaggttcctcatttgattttgaagaattaggggcactttagatggtttaaggatgaactattttgttcacctccttttatttcagctaatcataatctaccatctaataaataaataaataacaaaataactcatttaattatcaaatctaagttctaaccactattttatccattcaaaacaatatataatctcgtctaattataaaatctaaattctaattcttttttgtgaatccaaaccgtcatttaatctcgtataattgtaaaatttaaactctaaaatgtattccaaacgaaaatatatttagaagtaaattgatatttggagtgtatatagaagtttcgttttctggtaagaagctggtaattagggaatgaattcgattaaactatttgtgtgatttgttgtattatcatttatcataaatatttgattgtcactattttgtcaaaaatattaaattgtcattattgtgttcaggttcttagtacctcaaatcaaacagatcaagggtttaagtgtttaaccaaaccaatcgaattattcaaaaatctttataattaaatgactgttttaatacgctaaaccacttaattgtttatatcaatacaggatctcattatggcacaattattaaaataacagattttatcatattatttctaaatgagcgttacgttttaaactttcaattttgtatatacactataggttttgtgacaggtcgattattattgataaaagcattgggtttactgtatattttctttttctttttcaatttcttttttgctaaaatgttcattttttcttttcttatttgattctgatatgcatgattatttcagggaaaatatctacatatcatattaacaaaaaaaaatacaaatccattctataccatatacgttacattgtgaaaattataataaactcaagatatatatatacatatacatcatggtagtagtagtagtagtacacatttaatttcagcagttgcaccaacaactgagtaaaggacaaaaaactataaaattttgccatctgctatttaaatcattacgtattactagaaaatgatgtggaattcgacaagaatgaataataaaaattaaactcactagagacaactttcattaaaaaaaaaaaaaaagacttgtatcacaatcatatgaaagatgaaacaaatttgcattattatcatttttataattgaaaaaaaaacctcaattcgttgacccttcactgtcctccaatggcggcccctacgccgttggccttgcctctctctctctctctctatatctctttcttgatctctctctataaaagctcaaatagtccagcaagcaaaataatccaaaaagaaacaagataagaagaaaccaaactcgcaaagaaacaaaaaggaaaaaaaaaaaaaaaacgaattaaaaaaagaagaaataaatcctcctttttaacacctcattccctctttctccggcactcaaaagagaccaaagaagaaaactttagctctcctttttgtgttttctctcttttctttgttggtgttccgacaatggaggaagaaagtagcagctggttcattccaaaggttcttgttctgtctgtaatcttaagtcttgtaatagtgaagggtatgtctctgttatggtggagaccaagaaagattgaagaacatttctctaaacaaggaattcgaggtcctccttatcatttcttcatcggaaatgttaaagaacttgttggaatgatgcttaaagcttcttctcatcctatgcctttctctcacaatattcttcctagagttctctctttttaccatcactggagaaaaatctacggttagttctttttctcaatttcctctgtttttttatttttcagattcagactcttcttatggttttactctgtttctaatcagtcagatttttgttattcgaaaacctcttttgtaaaagttgaaacataaaactttttgtatatataaagaacacaaactcttgtgtctttttttttttttgttatttttcatgattttgtttgagatttgctttcataattatgtactttgagtttgttagtggaaattgttttttttggtttggagatagaaccattgtgatttggtccgattctctgtgaaatgtaacagagtgtgtgttttcatgtcaagcaaagcaattttattttgttttattacacacataaaaaaaaaaaagagatttattttattttatctgtgtttgttttgtcatgatcaaattatgatgtcagtactttgatgtgaaaaaaggaggctctgtttcttccccactctttcctcacgggcttagtcatcattttcctctctgttaactcttgtcttctttctttagtctaattacaaaaacaacaaaattcgaaaaaatgaaaaattttggttgctgtgcagtgaattaaatagcaccaatgtggtaaattatgagagagcacttagtgcattaatagcaacagcagtgaccataccctcttttttgtcaaagttcccaagttgaggatctgttcttgttttacagcttcttttgtcatctaattttaattttcaaaaccaattttaattttcaggtgctacatttctggtttggttcggtccaactttccggttaacggtagccgatcctgatttgatcagagagatcttctctaagtctgagttctacgagaagaatgaagctcaccctttggttaaacaacttgaaggcgatggactacttagtctcaaaggtgaaaaatgggctcatcatcgaaaaatcattagccctacttttcatatggagaatcttaagttgcttgtaccagttgtgttgaagagtgtgactgatatggtggataaatggtccgataagttatcagaaaacggtgaagttgaggtagatgtctatgagtggtttcagattttgactgaagatgttattagtagaacagcttttggaagtagctatgaagatggtcgagcagtttttcgacttcaagctcaacaaatgcttctttgtgctgaagcttttcaaaaagtcttcattcctggctataggtaataaactcaaaatcccttttcaaaatatttttagttttcgatttttaaacttttcttgatttttcgattttttatttatttttctctaagtaatattggttttgttagtttatcaattttgattttcttgatagattttttccgacaagagggaatttgaagtcttggaagttagacaaggagataaggaagtcgttgttgaagctgatagagcggcggagacaaaacgctatagatggagaaggggaagaatgtaaggagccggcggcgaaggatttgttgggattaatgattcaggcaaagaatgtgacggttcaggacattgtggaggagtgtaaaagctttttcttcgccgggaaacagacaacttctaatctgctgacgtggacgaccatcttgctatccatgcacccggagtggcaggccaaagcacgtgatgaggtcctcagggtctgcggctcacgtgatgtccctaccaaggaccatgtcgttaagcttaaaacggtgcgctttctctttctgtctttgctttgttttctttcaattttggaaatatatcattaattacagataaaaggcgaattgttgatagacagtttccgttaccgttaattatggtctttttgtcgcctaatctataaattttatatggctataattctacatccatatcaaggcaagtttcaagggcaaaagggtatatgtacatagaagatatgttgatgtttgttttacctctttcaaatttgcagttgagtatgatcttgaacgagtctttaaggttgtatccaccaatagtagctacgattcgacgcgctaaatcggatgtgaagctaggagggtacaaaatcccatgtggcacggagcttctaatcccaatcatagcggtccatcatgaccaagccatttggggtaatgacgtgaacgaattcaatccagctcggtttgcggatggagtgccgcgtgctgccaaacaccccgttggcttcataccgtttggcctcggagttcgtacatgcattggtcagaatcttgctatacttcaggccaaattgacactcgctgtaatgatccaacgcttcacctttcacttggctcctacttatcagcatgcacctaccgtccttatgttgctttatcctcaacatggtgcaccaatcaccttccggagattgaccaatcatgaggattgatgaaagatcttcaacggtcaaaaatttgttccggacttggaagaaaaatgtctcaagctttcataactgacatgctctttttgttgtcttttttttttttaactttcataaatatatagttttaactttcaaaccattgttttttttttcattccatttttctctaaaatttatttttatcagcttcaatttggggttttcggttatgcgcgcagctacttatgctttataagcttgggatagtgatgtttgtttttttttcttcctattttaatctaggagtaggaacatgattaacatcaaaaagagcactaacaagtatgttaaaaatttgcttcgatttggtattttgtatgtattgtaacatatatgggtgtaatttctacacatttttcgtttcatgttgtctctacctcatggattaagtcgaattaaattctcttagaaacttaatttttgttatgcttgctaaaacttaactaattgatgtaaaaacgttaaaatatatatcttgaacctatcatggtagatatatcattatcattaaatgaaataatcattagatgaacgcctattatatactaaaataaattgcatctaaatggtatcattcatgtaggcgtgatggacttacatagtgtgcatgtttttgacactcgatgctaacaaaagaccgacgtagagctcatttcttagctagagtacgagtgtcaagcgaaaactttcatgctctggcatcggttacaagtatacatgcaattagcctatctttgacaaacttcacacgatctccacatgtctgcctctcgccaaaaatatcactgcaatgcacttccttcttttactataagatttcttttatttttttgccaatgctttagttttaaactacaaaacaattattaaaagaaaaagattatacaagtgtttgccagattcattttattatatgaagtatttgacataactagaacataagttacataaccatcaaattataccaaaatttaaagaaaaatatttgttgcgaaaaaatagaaaattcatattagacgtagtcaaaaatatgggaaaaaaggaaaaaaaatagtacccaaccgactttatcaaaaaataaatacttaaactaaacattaatagacactaagattataacaaaaaaaaaaaaaagaaaaaagacactaggatttatccaaaactccaaatcccaaaaggaaagggtttatctcatacaaaccctcggctctatataaacacttgtagcccctctttaaatttttcacaaacgatctcactacttccataaataattaatctctctcaaaacttctttctcctgttccaaagttaagaaccaaaaacacgatcatggctttgattaagaacaacatctttttcacttctttgctgatttttgtgactctttttggagttgccgttggaggaaccgttcacaaagtcggcaacacgaaaggatggacgatgattggaggcgattatgaggcttgggcttcttcaagagtttttcaagtcggagacactctggtcttcgcatacaacaaagattaccacgacgtcacggaagtcactcacaatgatttcgagatgtgtgaatcgtctaaaccgctaaggagatacaagaccgggtctgactcaatcagtctaaccaaaccgggactccaacacttcatatgcggagttcctggacactgcaagaagggacaaaagcttcaaatccatgtcttaccggcctcattgggtcacgtcgctgttccggttcctggaccggtccgatcacaaagctcttcttcgtctccttcaccgtccccattggttgatccacccgttaataatgctccacagtatcagatgggaccaacaccagcttcacatagcgcagcttcagcagactttatctttactttctcttttgatcttactttgatagatttatgcacattttttattttattttttatcttagtttgatagttcgtagttttttttttttcgttgtgtagtttttgattacttcaacgtaagaaaaactttatgaaacgatctttatgtatatcatattttcaatagctaaaaactactacaaaaataaatgttagggaaatcttccagattttattttggtattctatcaaactttttagtgccttaaaatctgtaaaatatacaaagtatgaaggtaatcaagttctagcagcaacatagatgaagaaactaaattataaatccttaaattaacataatatttcattcctcattttaaaaacttggtcttgaaccccaaattcaataactactcacacatatcgttagaaagaaagataatgtaacatgtttaaatcaataaatatagagataggggttcatgaaaaaaaacaatgtagagttaaaagattagactcgtcaatttttatatagcaaaaacaaagttttggataggaaaaatatgtgaaagaggtctttaaaattcgagcatattggaaacaatatatatccaaatgggccatgtccggagtcaaatcgaatttgggcctaaaatttatatgtggaagtggtctggcattctggtatatcctttggttcggcattaaagattagactcgtcaatttttatagcaaaaattaaacgaagttttggatacgaaaaaagatgtgaactaggtctttacaaatccaacatatggtcctaaaacaatataaatccaaatgggccatgtatgggccagagtcaaatcaaatttgggtctaaaattaatgtagaagtggtctgacattatggtgtagccattggttcggctagccttggacaaaaaaacaaaactgaaccaaaccgaaccaaaccaaaccaaactaaaaaaagggtccggttgggttatggatacaactaagtatccgaatggatctcagtcacactatcagttaataaccgaactgaaccgatagataattatataattatagattgtttggaagtagaatctaaatacctttgtaaatcttgatgctagcaaatctcgccaaacaaataaccatctcatcactagcttgttcagaggcattgaaaatatgctcggtagtaattgatcccacaaagtaaaaggtaacctttcatcactacagaaaagaagaataatcaaccaaaatgaattgaaaacatcaaacataatttatttatgaatgagaatacaaacatctcatatctgtgttcaaaatcaatctttttgttcgctaattgttgacataaagagtctccatttcacaaacgtttatgatcaacaatttcttgtacaagtaaaagatcataataataagtaacctacgggtaggcaaactgttttttggtttagggttggttcagattttatggttttttggttttacaaaaactgaaaccatatagtaaaaggtatagagactaccacaacacaaagagctgtttaaaagacttattcttattgataataaacttttgttacaagtattatctcagttcttacttgatctaatctacccaaaagatcaaccccgactaagaataactaagctctaattctcttctctgttttttatcactaacccgtgaagacgaagagaactacacactcaccttcaagcttttgcacggctttgaagtttttacttagtatcgaaaaatatcccagagtgctcaaagcggctcaccctctgctctagaatatttatatcaattccccagaaccctaaccttaggatctccgagaatctcttgatatggaatcttccttgtttccaagcctattcctttctttattcttcgatataatatcttctatattttctcgatgaaccttgtctttgacacctctccaagttaacttccatccttggctcttcacatcattcgccttagcttgccacgtttgctctcgcatccatgtctgcacatcaagcgtctgatgaaacctgatgcagcgtcctgaaatccatcaacgatctgatcaccatcagctgattgattcactctgcatcttcatatagaaatcgtatgtaatttagtttggtcaaactttcggtatcatgaatcatatccctagttgtaactaatggcatggttctcaaaaaattcttatacccaacaagaaacatagtgcattatgtcccaattgatgtatttgttcaattggtttcatgaaacaatacaacgattgtctaaaattgggtagggaagagtttaggcctgacctgaatatttgctgaataaggcttgggtcaaaacttttgtaactgggctttgaacaccttattgggcggaagtttgcaaagcccaccagataaatatttgcttgatgagtctctaaaagtcttgtaaagattgatatttaatctatgtttatggttaaggttatttcagaatattgtggagagcaagtaaaaaaaacaaagataggaaattatgatataacaaatgtggatgatttaggtttaggaaatagcattttgttcaaatatgtggagaatacaccataaatgtttattttcttatagttatccaagaggttaaatggtttaggtaatcgtaattaaagatcaatacgctaaacatatgtaattattttttgcgtcagctggattttattatgtcaatttcaattacttaaatcctaatgccataattcagtagcaatttaaataataaaataaattaatttggatatctattcaaatgtactgtctcttcgaagataataatcaaactttaaattcaacaaatatcatcaaagcatgaaaattcaattgtttccagctacgtattaatagctttaatgtggaaaaagaaatattaatagcttttttcatggaaaaaagaaaaaaagaaagaaactttacttttaatagtatatttttgtctgagccaataaaagaaaaataatattttggtttaacatatttgtccctcgtgatagatttgattcgttcgttctccttctccttcattaaagacttcacgatcccacacctccacacacattgactcacacacacacacttctctctccaagttcagaaaaaccaaaaatgggttcttgtcggaaaaccacttctggttttcagcaaacccacttcttgtaataaaacagacaaaactagaaagaagcaaaaaagcttcgttttttttttctctttctccaaaaaaaaaaacccccccaaatatggcgtcaatttcatgggttttgaattctctattctcgatattgctactgactcagcgagtcaactcggaatcaaccgcagaaaaacaagcactcctcactttccttcaacaaatacctcacgagaatcgtcttcaatggaacgagtcagactcagcttgtaactgggtcggagtcgaatgcaactcaaaccaatcttcaatccactctctccggttaccaggaaccggtttagtcggtcagatcccatcaggctccttaggtcgactcactgagctccgagttctcagtcttcgttctaatcgtctctctggtcagatcccttcagatttctcaaatcttactcatctgcgaagcttatatcttcaacacaacgaattctccggcgagtttccgacgagttttactcagttaaacaacttgattcgtcttgatatctcatctaacaacttcactggttcgatacctttctcagtcaataatctcactcacttgactggtttgtttctcggtaacaatggtttctcagggaatcttcctagtattagtctcggtttagtcgatttcaatgtctctaacaacaatctaaacggttcgattccgtcttcattatcaagattctcagctgaatcgtttactggaaatgtagatctctgtggtggtccgttaaagccttgtaaatcgttttttgtgtctccctcgccgtctccgtcgttgattaatccttctaatcgtttatccagcaagaaatcaaagctttcgaaagctgcgattgtcgcgataatcgtcgctagcgcgctcgttgcgcttcttttgctagctctgcttttgttcttgtgtttaagaaaaagaagaggaagtaatgaggcgaggacgaagcagccgaaaccggcgggagtagctacaaggaatgtggatcttccaccgggtgcttcgtcctcgaaagaggaagtaacggggacatcatcgggtatgggaggtgaaacagagaggaataagcttgttttcactgaaggaggagtgtatagttttgatttggaagatttgcttagagcttctgctgaggttttaggtaaaggaagtgttggaacatcgtataaggcggtgttagaggaaggtaccacggttgttgttaagcggcttaaagatgtaatggcgtctaagaaagagttcgaaacacaaatggaagttgttggtaaaatcaaacatccaaatgttattccattaagagcttattactactctaaagatgagaaacttctcgttttcgatttcatgcctaccggaagcttatctgctcttctccacggttagcatctattatcttactcaattttgctcaatttcattgttactacactattagttagatacattgtgtagaatcttggttaggttttgagttcttatggttatggttatggttaagatttggaaccttagtgagattagggagtgatgatttgataatatttttctaatggatacttgtgtgattttgctttgctggcaagaaaaacattcttattagactgcatcacattctttagatattttatttttgttgaattgtggtagttatagctggagttgttatgcaattattaaaagagaaaagtgtgttgccgacattgttatgtgtctgtctggttagtgtcataataatttatttcataattttgcttctctctcactctttaaagattggaataaaggaaaagaaaaagactcttccacatgggcttttctcatcatcatatcttaaactcttttccttgaagtaaacttttgtctaaatgagtgatggaactaaagaacctttagaatatgaatattttaatttactgaaaatgtatttacaatttaaagctttaacctaagttatgatgggaattataatgttaagctagtactatgaacattttggtcttttgaaactgtgtttacattttgaagttaacttgcaatatctggctaataggtttgtgtttgttttagggagccgtggatcagggcgaactccgttagattgggataaccgtatgagaatagcgataactgcagcgagaggtttggcgcatcttcacgtttcagccaaattggtacatggaaacattaaagcttcaaacatcctcctacacccaaaccaagacacttgcgtctctgattatggactgaatcaactgttcagtaactcgagtccaccaaaccgtttggcgggttatcatgctcctgaagttctcgagacacggaaagtaacttttaaatcggatgtgtacagtttcggggtgttgcttcttgaactgttaacaggaaaatcaccaaaccaggcatcacttggggaagaaggtattgatctacctcggtgggtactctccgtggttcgagaagaatggactgctgaagtatttgacgttgagctgatgaggtaccacaacatagaggaagagatggttcagcttcttcaaatcgcaatggcttgtgtatcaacggttcctgatcaacgaccagtaatgcaagaagtactaagaatgatcgaagatgtcaacagaagtgagacaaccgatgacgggttaagacaatcgtctgatgacccgtcaaagggatcagaaggtcagactcctccaggagaatcaaggacgccaccacgatcagtcacaccttagcaaatgaatggaattgattaagaagaaagcagctttaaagtttttcttgtttgtgttcacctttttttttttctcctcaaaaggagataaagaaagggatgagataagtgtgtgaggtctttgttaggtgtgaaggtaaagcaaaaaagactggaccatctctgcatttggaccaacttctacaagatggcatctcccatctatttttttttcagtcttcgagatattctagtggttattattttttcttttatttgtatttggtgtttacaatttacaggtttaaatcaaaattcagtctaaaacacttccaagaaactcactcttttgggttttatgcatagtcactaattcttcagctgtttgaatagatgatctttttttttttaccaaaaactaaaacagatgttactttattagtttacattattatcgacgtaaaatgatttaaaaataataacttgcatgtaggaagtatatatatgtgtcatatagtagtagaaatagaaagaaagagatccgggtcgtcttatttgaacatatcaagcgactaatcagtcatatgagtcattagattagatttgctacttttcatcatacaatattttccaattgaaagtgagttttttacatttgcaattagatacaagaccaaagccaaaaacagtttccacttttgaaagcttgctagtaagtcattatgaatatgattatttcaaacattaagctgttaataattataaaactttcatatttagttggtggtctgcatttggattattaaataaagatgcaaaaaatatcacaaaaatgctcaaagatttcgtaacaaatgcttccaaaaaaacgcacacatataactagtaaaatgtaaccaaaatataacaaatttacaaattaattgaattttagtatagtgaattctattctaagtatcattacgtgagattttcttatataattatttgcttacattttgcatgcaccggatacataataccaaaatatgcatagaaacaccatttatctgataaagtaggtgtttaaagctttggtatagttgttgtggaaattaagtgacgataaagtttgtatcatcaaaaataaaaattcgtttctttcaacaagaaaccgttcataaagaagagtaacaggttaggaggagaagagaagaagatagaaaatataataaactagaaaagcagccacaagtattcaatcctccgtacaccagtgtttgataaaactttactccaaccgtgtattattactcttatcctacagcatctaatagaaaaatgaggagaaagtgaaagaaacaattttcggtttgagagacgaacaagggactcttctcacactttctgtttatgattggtctaattgaaatactcttccattaaatattaggaataggatttgcgttcacgcttaaaattgtgtttacacttaaatcaagacacccaagttgagagaatagatgttgatgctctcatcttctccttttctgtttccatgtacaagttctacatttttattttgttaatgttacattttgtttattctacagtaaaaaaaaaaaaaaaagagtgaattttttttcctaacacttactgttgtgtaaagaatctctgagctgtagagatggccgtatagcacaatagttttatcaacagctactaaacaatcacatgagtcacattacattattataacttaaaagaatgtcaaataatatgcacgcatccatacatagattatataggttataggatgatacaaccatacatgaggatgtatatcctcataattcaacttattatggaacttgattaaaagagtaatttaagggaaagcaacattagaatttggagatgaaatcaaggataatttggagaatctcctgaggcttttcttggttaatgaagtgagccactccttccatgaccacaggctcttcaagcaaaggcacatcttccttaaactggggaccatgtatatattccttcacaccaggcatatagtagaccagatcaagctcccctatcacaaactttgtaggaacctggattttgcttcccacccatggacccaacaactcattgttcctgccattacaagacccattcaacacttcttcctaaacaatagagacaagacttgtctggttcaaacttacctgttgaagttacggtagtaattgactggaccagagaagcctttctcttcaaacttgctgacgaagtaagcaacatcttcctccgttagccaagacgggagtggtatagtttcgcctttggatccccaaaaacttttgtccttcgggataattaccggtccaggagttctataagtgagtagtctcttcatgactctctctgttccaacctctgcaatctcagcttctacatctccaaattcctacactcaaccatctaacctaataactaacttttccttcaagtaattatctacaagactataaagaacaaacctgaaacctgcagatatagtaatcatcgccgtagaaagcacgcatgcgatcaacgggcttcaccgatggatcggttggccggaaagagaacggaacactgaggttgaccagagctttgactctatctggtcggaagagacataaataccaagcgatgagagctccccaatcatgtccaaccacaaagaccttctcatcctctgaggcggttaaggcggatatgacggcgattaagtcaccaacgatgttgaagcatgtgtaggaagagatctcagcgggagcatcggagtcaccgtaaccacgtaggtcaggagcgacggcacggtagccacgagcggcgagtccagggatctggtggcgccatgagtaccaaagctcagggaaaccatggaggaggaggactataggaccatcggagggaccttggattgctacgtgaatgtctatgccgttccctcttacctttctgtgttccattgtaattactttgtgtggtcgtggccaaggcttgagtgactaatcttttatactagatagataccaacacgtgttaatataattactcatttatctctaaaagttttttttttttttttttttttctctcttttcttttgctattgtgtgctgttcttagtcaatatcacaatggcatttagcgtcaaatccaaaccccgtacgagtgcaatgaattgagaatgaattgacgacttgacatttataaaattatgcaaggttgatgtcacaaaactaaaaagatgcgttgtaaacttttctcagactttctattgtttgtggaatcaaattcaaaagattttggatagaaacgttctaaatcgagtaaagatgatataacatttttctgcaatttttaggctaaaaaggagatacatgagatgtgttgaaatttaagaatatctgactttttaaatcgtggagtaactgtgtttctttagttggcaaatcattaaccaaattgacttatttgtttcctttttgtaagtatggaaagaatctttagaggattgacacacaataaatgcatttcttgaatacaaagttgatgagtctttcatatacattagtctaagaaaaatatttgggttaactcttgcattcatctcctttaatttaagccaatcattatatcatatcatataataataataaaaacaaaatttatataattttaaattttaattaaattagattaattatatatagaatttagactttacaattaaacaaaattatatgttagtttgagtttatattataaatattagatttagattttaaaattaataaaaattatatgtcgttttggatttataaaaaatgtgattaaaattgagatttccaattaaacaaaattatttgtttatttgggtttaaaaaagtagattagagtttaaattttacaattaaacaaaattatatgtcagtttgagtttataaaagagtagttaagatttacattttacaattaaataaaattatatgtcagtttgagtttataaatagtggttatattttaaattttacaattaaatgaaattataatttgtacaacatgcataatgattggcttaaagtaaaagaaggtttactcaaaaattgtcctaaatcttatctaatgttgtgggttagaatatgcaatatgcatattttttccaaaatcttactttttaatctttaaattaacattctaactcatcttctcttatccacctattaattctacatatatacagaatttctacactctaataatatatttgtttaataaattcaacatcctgcctcacgatttttgtttcatatattttattattattatatttgtatttttgtgattaaattaatatacattatcgattaaaatttattaaaaataattaagagttagatagtcttataaatatattttttaaacctttttattttatattattcttacacatggtattcacggtttaaataattttgttacattgtgatgtagcttagaagaatgtcacatgatatgcacgcacccaactttattattaatacatatattacataggatgatgatataaccataagatgaaaaaaaaaaaaatgatgatataaccatacatgaagatacatcctcaaaattcaacttattatggaacttacaagagtgttttataagggaacgaaatattagaatgtggagatgaaatcaaggattatttggagaatctcttgaggcttctcttggttaagaaagtgagccactccttccatgaccacaggctcttcaatcaaaggcacatcttccttaaactggggaccatgtatatattccttcacaccaggcatatagtagaccagatcaagctcccctatcacaaactttgtaggaacctggattttgcttcccacccatggacccaacaactcattgttcctgccattacaagacccattcaacacttcttcctaaacaatagagacaagacttgtctggttcaaacttacctgttgaagttacggtagtaattgactggaccacagaagcctttctctttaaacttgctgacgaagtaagcaacatcttcctccgttagccaagacggtagtggtatagtttcgcctttggatccccaaaaacttttgtccttcggtataataagcggtccaggagttctataagtgagtagtctcttcatgactctctctgttccaacctctgcaatctcagcttctatatctccaacttcctacactcaaccatctaacctaataactaacttttccttcaagtaattagctacaagcctacaagagtataaagaacaaacctgaaacctgcagacatagtaatcattgccgtatacagcacgcatgcgatcaacgggcttcaccgatggatcggttggccagaaagacaacggaacactaaggttaaccaaagctttgactttatctggtctaaaaagacaaaggtaccaagcgatgagagctccccaatcatgtccaaccacaaacaccttcttatcctccttgattaaggtggatatgacggcgactaagtcacctactatgttaaagcatgtaaaggaagaaatctcagccggagcatcggagtcaccgtaaccacgtaggtcaggagcgacggcacggtagccacgagcggcgagtccggagatctggtggcgccatgagtaccaaagctcagggaaaccatggaggaggaggactatagtaccatcggagggaccttggattgctacgtggatgtctatgccgttccctcttacatttctgtgctccattgtaattactttgtgtggtagtgacgactaatcttttatactagactagtatatagcacggggtgattattttttattaaattaaagtttgtgatctggagagtaatgcagaatcatgattataaaagttaaattgtatcgttttatattctttaaaataaaataaaaaaatgttcataaaagtgtctaatattggtacaatttaggtgtagaggtgtgtggttgatgtcaaatcatttaccaaattaatttggtaatttatttgcttcctttttctactcatagtatggaaagaattacgaggattgacatttgacatacaataaatgcattactcgaaaacaaaattgacgagtcttgtcttacaaaaaaaagttgattagtcttttacaatcagtaactagatcataacctgtgctatacaccacggacattaatattttgtataaattaaattgtatattttatttgaattacataaaaaatagtatagtataaaaatgatgctataatattttttaatatttttactatttggatataatgctgcattggattgactttgtttaaaaatattatttttataataaatacaacatatgtagtttttagtctttatatagtattttgcttatatttgtggacctaattgagccatatattagattatttttgatacggctaacgaaaaaacggacccgataattaacccaatacccgaaacaaaaaaccgggttaggacaggttaaaattttaggaaattttcttattgggtagagttttcgtaaacccgtggatatccgattggtccggaaattacccgttacccaaaaagagtattcaaaaactcaaacattaatttaatatccaaaatattaattatatttaatcgtaatataatctaattatctaagattataattataaatctaaatatgtctattaattttggacataaatatccaaaacaactaaactattcaaaaattatttgttatgtttataaacatttagtaaaatttattcaaatataactaaatttattaaaacttaaaaaatttaaatattttttttgtttggagacccgctatctacatacaaaatacccgtttctattttttggggtatttttagggcctgaaactttttatccaaactgacccaaacccaactagacccgacccgaaccataaccgaatatttcgaattattttattgggtagtaaatcatataccattaatcctaaacccgaacgggttctacccaaactcgaatgggttactcatatgtccaaccctattctctaatttaattatctaaaaacttccaaaaaaaatatatgttttgctgactactttttattcgaaaaattttacatcctcttctaccaaaatcatttcataagacatcgcaaaacccttggaataatgatttcatgaatgaagaatcctaatttgaatatatcaagaaattttgaaaggttttaagtttttgataggtatgtatgtgagaaggtatatgatattattttatttgattttaaatgtatgatattattttatttgattttaaatgtatagtcaactgcgatttgtatatgttttgttgatattatttatgttgttaagtgtttaaaattatacacttgtattttgattgttaattttagagtttcacctgtagtataccatcttgtattattatcgatctaaacccgtcaattctacgattttcaagcttgtattaaaaattgaatcacatcatacacattaaaaaatctaatatgttattaattattatagtatataagattataaattttcaaaacaatatgtatgactcagtactcagtagaaagttttcttaaatctatttttgacccattataatatttttcatgtattgaacagtttatattcgtttttaaaaattcaaattagggcatatgcgaaaaaactctaattattttttataacgatgatattattttttcgcaaaaatagaatcatataaagatgagaagtgaactataataattaataaaaattaatatgataatttagatatcaaatctaatttgttgattttaattggttacttttttggaaattaataatgcatttcgttttttaattaaatttaattaattaaatttgtatttgactttttaattcttaaagagatgaattaatttactttttaaaattttatttctaatgacatacctatgtaattacttacaaaaaataaggttacatttaaaatgtacttcccaaataatatagtaggatctaatattgtggtttagactacgtacagttataaattaaaactaatttaaaataataagtcaataatttgtttaaataagttttgttttctttctcattttatatcgtactctcatttttttttatcttgcaagtattaaagacgagaaatatagatctagatcgttactacaaaaacgaaaataacaccttaaacttaaaacacaatacaattctcataataataagtacacgacactactaataaaacacataactttgttaaatagactcaactccaaaacaataaaaatcttaaaattaaacatagaaatttagaaatttatttaatcagggaaacatttcgaaatgtgcaaatatctgtgtttgctaaatatacttataatttataattgatgtacatttgaatcacgcaactcagattagcatatatacaatttgcaaatacatgtaattttttggtcgagagtagttacggactacggagtattagatccatttgcattagattgatcattatcggttcatattagacatatgtgttcatcatcaaaaagtcatatgatacaatatgatatatgacttgatgatgatagccaactcgattatattccacatgcgatctggttcacgaatgattttaaagcgaacatacaacacttcagatgcaggttcgatatttttatgttcaacatcatcaaacaatagtaaacggtgtagaacatttatatcgtttgacgtgctcgaatatctaataaggtatgtcaattcatatatcatgagatgcaattgcttcaagaataacaatgatgattcttttatcttttcgagtgagttgacgtaattaataggtaagggttctcaattaaagccaaaaatcacattatattgatgaaaaagtcatgagaattactgataaaaatattattaaaacataaagagaaaaaaaaacatattaataaagctgaaagagacatacacacattattaaagcggaaagagaccgaatacaaacacacacttgacaactattaatttccaaataagtcgtgactcaaacttctctaaaagctctttactccgatcatcgagattctctttttcacttactctctcataaacatcttcagcttcttagattcaatcatttctttcattaattggtttgccttattttgcgccatgcttattttgtctcgtttcaattcttggtccttagattgtttaaattcattacactcttcgttaatcactactaaatttacgtgatctttctagatgtattttctcttgctttgatgtgcatagtcttcctttatcttggttcgacgatctttaaactggttcacgatatacctcttttcaatttcaaactgctttttgtaagttttgatatcaagaaaatattcagatggattcattgatatttttttagtaagttgaaatttgtgatattgatataacaatggaagtatgagtcccattttataaagaacaaaaaaatcaagaatctacacagccaataagaatacaacatgtatccattccatattttaatctaaaagaaatttctttgcccaatcaataaacaccacatggcatgttactaattattatttaaaacctgtaaattctatttaattttttttgttcttttttctgtattaaactgaaaatagaaaagagactactttaactttaacaaatttattaatgtctttagtcttataaacctccgctccgtttattaggctcctcttcgtccccaacggctagtaataaaaaataacatttttataactaacactcaatttaaacccttagatctcaattaaaagcaaaatcaacggtcacgattcgattcgattcgaacaaaaaaggaccgttagagagagctcaaacttttccttttcaaaataaaacagtgccctttcctcaaccacaaatcttcaccattcgcaatttcacagtcgagaaaaaaaagttagggttttatttgttgttcctgagagaagcgaaagagatttttgattcagagagagtggcgtctggttgggttgaagccgggacgggaaagagtcgtctccgggatttcttttcttctttgttaacgagtcttggaggagcgttacttcagatcaccgaagaagaccaacaacaaggttcagatattatggcgtcttctagagtctctgatcttcctcatcaacgtggaatcgcaggtttttgtttctcgatcttttattaatttgatttcttgcaatttcgtggattttgtttttctatttgattgaaattgaaatgtaccttgtttaaattcgttatagatcttgatagatttatctgttgtatccgcaattgaatgttcatgattggatctgatctgatgagactgcaagtttctattaggttaattactgatgggtttgtgttataaatgaattttgttaggtgaaatcaaaccgaagaatgttgcaggacatggaagacaaaaccggaaagttcttggagacattggtaatcttgtcactggtcgtgatgttgcaacaggaaaggtaattttaaacatctctgatcattttctgttttcatccaatattgcaactcataaagtatgtatattgtcaggatgttgcgaagaaggcgaaacaaccacagcagcagacaaaagctgaggttattgtcattagccctgatgaaaacgagaaatgcaaaccacattttagcagaagaactcatataagaggaaccaagacttttaccgcaaccttaagagctcgaagcaaggtaagaaatctcaaatcttttgataagattagcaatgtttttgatgagattaaccatgtttgatgatctaactcctctgtttcattgtttcataggctgcgagtggactgaaggatgctgtgatcgacattgatgctgtggatgctaacaatgaactggctgctgtggaatacgtagaggacatcttcaagttttataggactgtggaagaggaaggagggattaaagactatataggatcacaacctgagataaacgagaagatgagatcgattctgatagattggcttgtagatgttcacaggaagtttgagttgatgccagagacgctatacttaaccattaacctcgttgatcggtttctatctttgacaatggttcatagaagagagcttcagctgttgggactaggtgctatgcttatagcttgcaagtatgaggagatttgggctcctgaggttaatgatttcgtctgtatttcggacaatgcctataacaggaaacaggttttggctatggagaaatcgatcttaggacaagttgaatggtacatcactgttccaactccttatgtgttccttgcgcgatacgttaaagctgcggttccatgtgatgctgagatggagaaattggtgttctacttggctgagctgggacttatgcagtatcctatagttgtcttaaaccgtccatcgatgctggctgcatcagcggtttatgctgcgcgtcagatccttaagaagacgccattttggactgagaccttgaaacatcacactggctactcggaagatgagattatgtaagctaatctacactaatccttgctctatgttattattggatttccatttttagctgtcatgactaaactggtttggtctggttgttttcagggagcatgcgaaaatgctgatgaagttaagggactcggcttcagagagtaagctaatagcagtgttcaagaaatactctgtctcagaaaacgctgaagttgctcttcttccttcgcttgacgacttctctgtttcttgtgcatgaagaaacaaaaccctagtctgcttttgttgatcatgtagctgtcatgatctctttgtgttctttctttcttttttctttttttggtttttacattgatcctctgtatgatcccgtcaaagataatgatgttaaccatgaacaagtttttaagtgtggtttcatttatcttcagtttccttggattcctcaaattacgttttggaatttttaactctttttgtcacagatatcttctagttaaaatgaaatctttggttactaatctaaagacataaattcgtttattgacgaatctaaaaaccataaatcacttggatatatattcattcccgtttttttcctctcttccttcgaaactgcgtttcaaacctctaaatcgagctttttgattttgagggttagtgttggctttgttgatgagacaattgcgataacactacttttgtgtagttccactatatcaaaactttgtgactttgtcacatgttaaatttgatatgcatctaagggcagctggattcgcagaaggaagagtgatgaggtggacggtggaccaatgtggtttgctcttcttccttcgcatgacaacttaactgtttcttgtgcatgaaggaacaaaaccctagtctactttagttgttgatcatgtagttgtgatgatctctctcttttgttctatctttttgttgttgtttggttttaacattggaatctctgtgagatcggttagtgagaatgatcgacgatcatggattttcgggtttgttgcaggattttggctgtgattcacttgcaatatattgtatgctttgggatccagtccaaaacaagcaatccgttatattacctcaagggcaagtaagatcaaaacaaatgaataaacacaagccacccgttacatatagattcaccatcacctcttacttcactgctcgatatttttacacacaatacaagtacaattcaaacaaatgcctaaaacctatataaactacaaaacaaataagctcttacggatactaaaaatcacaacttaggtaagagccgttcttcaagggctttgacccgtctctgttctgtcttctggaccagcaagtgtcacctgcaacacatcagtttcatacttacatcaacacctctctctacaaaaaccaaagtttctaactccatcttagttatacttacattacaatcacaagcaaatcttcgtgcaagcatgatcgcagcgtttctttctctctcagactcaaaagctatcacaaatgacactcctttcttcgcctgccaatacaatgcctgagctgcagcatttccacctcctctcactccacatagctactcaatatgatcatcaaagattatgatattatagatctcaccgtgtaacactaaaaatatgacaattttctcggggtaaagtagtatccttacctgcattgcactagagtagtactcttttgcaatcactgtctttcccttgcaaagttttatcctcattttaccaacatgaaacaagtggatagattctgatgtatggtcttccccactcatttgggtcacaactacctgtaaattacaataaggggaaatataatatacatacaagcaccaaatatataaatactaattccgagtgttagagaaaccttacattgaaatcaacatcgtgtttccgtactaatgcctcgacatagctacccaatccagcagctgcaccaaatcaagactttgttatgtttgataaatcatctagtaatgacgaaaatcaggaccgtgtttgttgatttgtcaaagttaagtaatatctactaagtgacagaacctacacaaaccatttgatcatgttgacataaacaataaccttttacagtaaataacataacaatgaacctggatcaatctttcccactgtggataacgaaagcgaatggccatcgtagatgatatctgcatgcaagactcgtccaacgtcaaaaggctcgggagcgtaaactgattttgtggcacctgagataggaacatagttaggaaacattttcctcaatgggaacaatgttaaacttgattttgccctatttacaccagcctttggaaatatattgttcacaattccaaaatcattagttagaagaaacaatctgatttgtaatcgactagctcacagaacagaacattttaaaactcaaatataataagagaaagaaaacaatgagaaaggtgagtggacctgatataagctccttcttggagccatctgaagatgaacggtaccattgtatcgtacacttggaaagatcaggtgcatcattggagcaaggtctaactcgcaaacaagatcctagagcttcagtgccatctatttcatatacaagggatatattttcctcgctctttctgcacattgcgagctgaatcatagaaaaatgtatatagtatcagaatccactatttgtcaaccgcatacagtcacaaatgtggaagttaagacatcaaaaggacctggaatgcactaaatagaatatatatgtgtatggaatatggatccaactaaccttcttttgtagttgaagaaaatgttttgatttctctgcaagctgatttcttagtgctcgaagctcatattccatatccattacctaaaacaatacacatgatttgactttttaaaaacaacataagatactaaagaagcatcgacttagacagacagataaagccatttaaacccaagagataaaccatctttcatctacctaccctgcttggttgatgcagcattttaatccgcctagcttcttgaacttccttcattagatcttccatgtcctgatacgataaattataacaatactctgttaacacgaatcaatgttataagcataggacatttacaagattatgatagaagccatcactaaaatacttgtttcccagaggcacgagacatctgttcatgttctcgcagggcttcttcaactctttgtacagctgctcttgcactttcaatctcagcacgtgcaaacgctctttcctcgtcgacaagtttcttagcatcctctgaggcctagttaaaaaatcatacccactaatcagcaagattattagaacacatctgcatctttttcaagctagcccatctagtaaccactaatttacaaccgacaacagaagactaatacaaatgtcccaagcaagataagaaaaagaatcaagaatagtaagtgaaagattatgtctgtaaagaaactacatcatagttctttgtcaaaagtaatagaatataaactactcaaatgaaaacaaaaaggacagactctctcttaatcatctggttagctcaaggactaacaaaaactgcatggtattaagccgtggacgaaaacgtatttgctattttagaggacttggttgtttcaagtgaaatgacatagacgtctcctaactattcacctcaagtgacacgagaaaagaaaatattgtcactgtctcaaaggcacactttacctgctttaaaaaagacgctagctttttcacttccgctttttctatgaatagctctccttctcgctgagtcaactgaacagctagagcttcaacctagcagaattcaaaattccaaacatacttaagatatagaggtggaagggaaaaatgttggtaatggggattgtgagacaatttaagaacgcagaactgaaaatggaaaaaaacacatttcggtttgtagaaaaggctagaggcgatatatatcaccatgtaaaggaacggagctaaatatgatgactaaaagactataaaagagtaaaagactaaccatggcaatggcttcctctacatcatccttgtttctacctgccacacgtcctcttagagactccaatgcatctcgaagtttctttaaaagaacatgtttctccaacgaagttgcttctttgagttttgcctgcattcgttcccaaccaaattagccttaaatttttttttcaatcatatcatattttcactttagcaacctagattagccttcttgatcccctatttctgtatttataacaacaaaaaattctttgctaacaaaaagtaaggttatcaccgaattaaaatccctcttattaaatcctatttagtagactcaatcaacacaaaaactaacataaatgtgcaaatcaactcattacatagtaaccaaagatagtaacaatacaagagacacatttcatctataagacctcaacaaaaagagaataatatcagacctcctcagatagcttagcagctgcagccaaacccttctcaaatttatgagcgaggtcacgaacagacaaacgtttctgctggtccataagctgcgctgtctcacgcgcaacaacctctttcatggacatcactttaggatcgtctttaacatcaaatatttgatcattagctccaattctataattaggaaatctacttgaagcaaatttcacatctgctgatactgcaggaacaccatctctctgtaatgaatcccgaaaatcgcgtgtaacccttgtcattgtatctgtttataaacaaaaccaaaaatgcttagacaaaaacaaaataaaagacagaaaatgctagtagatgtctaaccactatgaatagtaatatactccaatggactcacagatctgttgttgaatcttcacaaaaatctaaaacaacaaaaacaaaacattgtttttttcagtacctacgccaatgttggaaataacaatggattcaacacacatttaaaaacattttatagctacagagataaagaattgatggatgtcaaaaccctagattaccaaacaaaagagctaacaacaactacccatataccaatttagtaacaaatttcaaagaagatagaaattgaaagtcaaattttaagaacttgaaatcgaaaatcagaacacaaaatactgcaataatcacgaacaacgtcggagattttcaagagaacaaagctaaacacttctcacctgaatccgattaatggatcagacaaatgttttgagttgagatcgaatttgagaaggtcgtcgagaacagagaaggaagaagaagaagatttggtctgaggagaaggcaaaaagtgaagtttgagagagtcgtaagcattagctttactaaaaagcaaagaccgtgaaaaaattgtggctttggtggaaacactgtcttttttctttttttcttttttttttaatttagttttgtttaaaagtttttctggtttaggtaataaattgttgcataattttcaactccggttgatgtgtgtcgctgtcggactgttgttgtctgaaacttaaaaatcacagagcggtcacgggttctgtttcgtgtttaactgccacgatattctttttaattgttttttaaaagggaaagtaatcaaaatgatgacactaataagagtggtttggtgtgaaacttagacctttcttacacaaatttggtaaagccaaaactttttttggtcatggggatttatttttttttactttttatttttttttttgtcataaagaaattatagaatcttgttgtgaaagacgtaaaatataatgcccaaacaaaaaaaacgtaaattggcggataaactataagttcccaaaaaaacataagctggcggaaaaagagaattcttcggaatctagatcctaaataaagaagatgaagtaaactcaaattataatgcagaaaatatcaaaccaatctcgaaaaaggacgatagtacaaactaagatccatattaacaagacaaaatcttaaaaaaataagagatccaacaaagcagaaactccacttcttttaacacacctgcaagtacgattgatcaaatccaaaataacatttaccacctcctatcacgttgagagccaatctctcgagaaccaaggatatcataacccgacatgcaagaccactaaaagaaacacaaacaccattccagatacgacgatgaccaccaattcgtcacttaacgtctagatagaatccttcaaaaaacaatcagattacgacaaaattgtaaaagaaggacaagaagcgaggcaaaacttctcaaaacccaccaatcacaagatcaccaatcacgagtaaagccacaactattttaattaaatcatacaatatcctaaattaggcttttctttttgataaattaaaaaaaaaaagataggatcatccaacaaaaatagtacaaacaaaaaatgtcaaaatcttgcatcacctctaaaaacctttcatgttaacaaaatcttgcatatttttgccctatacaaagtcttgcatatatacaaagtcctttggtatattgttgttagccaccttatctaactcttttacgggctctgtcctcatgaagaagaacaatttttttaataaattgttaccttaccacatataagcttaatctggaatggttgtgatttaatcaatgaagatattgcctcaaacctgaatagaggagtgaaagtggatttcaattggttggttatcaaacccatcagcatgatacctgttagtttctcggccataccactcaatcattgccataaatatcattgaagtctactagtctgtttgagacattcaactcacacaagtggtgggttattttctctgacaaacacggccaaacaataaaattgctgaaaacaagaagttgcctaaaaaaccaaaggacttgtgagaaaaatggcaaatgcgggctaggatgggctgtggattagaggcccaatatgcctaatgggatacaacacgacgtcgtttagaccagccatagttctcttgtccgccaagacgggagagactaaggaaaagcataagaagagaagaaccaaagaagaagcaaagaagcactgataaatctctgcaactcaacaaatttctgagattagctatggaaggttcttcatcttcgtcttcgttaatttccaaatcggacgctgagttggaggaaatgctcgatcggatgctgacgagactcgctctttgcgacgactccaagctcgaatccctagtctctaacctccttcctcttaccatatcttctctttcttctcaatctcccgttgttcgcaacaaggcaagtcagagatttacgagctcttcctctgaatttagtgtttgacgatttcatattgattcttagtgtgtgttgatttcatttttcaggttcttgagatattgagtcatgttaacaagagagtgaagcatcagcatgaaattggtttgcctttattggctttatggaaattgtacacagatcctgctgctgctcctatggttaggaactttgctattgtctatgttgagatggcttttgaacgagctcctgcaaaggtttgcttcatcttaatagttgttggaatttgcgtttgcttgtcaatactttggaaatgagaggactgatttttgtttaagttttaataggaaagggaggaaattgcacctaatacactggagaatgtttcaaagcttcctaagcagcatcaagagattattttgagaattgctattaaggttgtctctcagctcctcctttagtgtggatttggatatttattttatgactgctattatacattttttctttcgttgttcgaattgttacgcattacttagatgacgaggacaatatgttttctttattttttcttcatgccgttgtttgtgtgatgatccttttacatttttctctctatttgatgggtttctcatgttctagtggttagtgctacatgtagtggtagtcctatatgttttatgtagggaacaatatctggtaatttctagactattatgaaatgccggagaaaaccattggcagctttattagtggtttcacttggatagatgacaattttgaaaaaatctatttgaacgtcatgcaataattggccttacaatgtgctcaaattttaactggtttgtttccaggtcattggagaatgtcatgcaagcaagatcagtgatgatgtgtctgcgaagtatagatctttgattacttctcaggataaagacttgtttctggatttttgccttcatatgcttttgtatcaaccatcttctcaagggtatggaatccattttgagcattgtttgaccgtcttttgttattatttcatctaataagagttgctcgaccttataattcagaggtggatcttctcctgggctttcagtttttcaagttaatcgtataatcggaaagcaagcattaaaaggggacacgcttacaagacgaaaggtctgtcatttaactccaatttgatctctttatgggttctatagctgccaagcaatacattcctcactaagaactaccattttctaaaaattaatcaatttcttaagcagttggggatcttgaatgtcattggaaacatggacctacctggtgaatctgtatatccattgtacattgctgcatcagtggataggtacgctttgtgtttttgccgcatgacatgctttgtttctatcacatgacatgaactactattttatcactacctccgtgcactttgtatctactattcatgtctctgagagttggtatggatttgttggtgaaaattcattcaagtcaagaacctgtagctaagagaggggaagagcttctaaaaaagatagcttctggaacaaatttggatgatcccaagttgataaacagactgttcttactattcaatggtacgtaatcttcgtctttttccaacattgtgattatatttttagacactaaaatcatttatattctaagaatgatattaattaagctatttctagcatatagaatcaagtctatgtcttctgctagtttaaatagttgaaaataagttatcttcggctacttgtggatgacattactagggatccccatttagtatgcagactattgcaaatttgccatgtctgctgtggcaacagattcatataaattttgggagatctggagtgctgagggcgtcttctcgcgtttgatgatttttgtttttttcgtttgtccatgttaattgccactcatcaatttgatatgcatgcaggcactacaggcactgaaaatgttgctccggaacataatgtagctccaggaaatatatccttgaaaatgaagctcatgtctggtttctgtcgttctatcgcagctgcaaatagttttcctgcaacattgcagtgcatatttggctgcatgtatggtatgttggtttaatatatggcttaattttaaactgaactgtataatggtaaacgttttctgtgtccatagtctatatttatgtcagtttagttagataatgaatatatatggtttctttgtagatagttttttttatagtcaatctaattcatacaaattggttgcacgacggacattgtaagcttctaagaaaaagtaaatggtatgtgctttgactattgtaacaagaatcatttggcttgttcatgacgctagtttctctcttaagaggattcaattatgaaggatcagtgttttcccttgtcgtttggtgcagttaaaagaagaattaaactacctgctctctatgaattggtttgtttatttatttttcatgttgattacttagtgtttttgctatctaccttgtttcaatgggacaggaagtggaacaaccttaaggctaaagcaaatgggaatggagttcaccgtgtgggtttttaagcatgtaaaaatattcttttctatacttcagcctgaatttacgtttgttgtgtgtaaaagcagacagtatgaactcaatctatttattatttttgtgaagaaacaactcaaatgttttttgctcaactcaatgttagatgttttttatggaaaattccatggaggaccataccaacaatagccttttctcttttttcttttctttttgtttggtcttgagagtctttgtttttgagtatgttatgcttacatcactggacttgtttaaaatgcaggggaagatagatcagttgaaacttatgggacctgttatactgaatgctattctaaaaatgcttgatggtttcacaggctcagaaacaggtcagtttttataagaaaaaagaaaagtcgcgagtttcctaatgcaagtgttcaaatgagaatttaagtagatatgctacattctttcattcagatgctctatcgagggagaccaaaacattttcttttcaagctattggtttacttgcacaacgtttgcctcagctttttaggtaaggacttctctcttctctgccctacacttgttttgatgtcatttaacagatattttgtttcttttaaacttaactttcagagaaaagactgaaatggctgttcgtctttttgatgcgctgaaattagaaacccaatctcttcgttcaaccatccaggaggcaatagtttctcttgctgctgcatacaaggtctgctactttaacattatatcgataagttatcatttcattttaaattttcgtccttatggtttcattttattttttgcattcttttggtggctcaccatgtcattattggtatttgtttctttaggactccccagagaatattctcagagacttggaggtgcttctgctagcaaattctctggcggtaagtgtgtatatatatatatatatatatatttttttttttctctctctctttttgtgtattatttcaagatgattttgttaccaaagtatcaggggtttataaagtctagtatctttattgcttctattgaccaggaacaaaatgaagctcgcttttgtgctttacgatgggcaacttctttgtataattcacaccattgtccaagtctctatatttgcatgctgagtgcagcagatccgaagctagatataaggtacaggacatttatctcattgcttattgttgtgattgtggcatgatgaattgcgtaaaatgcatgttgactgtgtctgaagaacgttctccaattcagttttttttttctcccgatagattcgccctatatttatacatatataaaaatatatcaaagctgaaatcgaactgacacatgaaaaaaccctagctacccacacacgaatggagcacaaaactgtttgagctttgtccagtggagggtatacaaagtgggatcttttccttctaattttgtagtacttttttgagttcaatctgtattaggttagttgacggactaccaaaacctcttccgttgatctatcatgacagaatcttcaatgcttcatttgtttctggttcttgctatttattgaagtgatgtgtatttattaactttttctgctttcagggaaatagcactcgaaggactctttctgaaagaagaaggtcgcagtatagtctctaatcatgaccataagtacccaaaatttattgagatgctggagtacattctcaagcaacagccaaaactgttagattcttcagaaatgagaagccagaagcttctctttccctcgcaagtctatctggtcatgataaagtttttagtgaagtgttttgagttagagatggaggagagcaatacccaggctgtagggactgaatttttggattcggcacaaaaaatgtgttcgttgttggaacattccttggcattcgaaggctcggctgaactacatgcttgtgcttctaaagcattggtttcagttggctcttaccttccggaggtatgccttcttaaatacttctttatccttttaatttctcccattttctatagcagttcaaatctcttttaagttaagcctctcaccttcctttttttctttgcgtgaagatggttgaactttacttctcccgaaaaattgtgtggctaagaagtctgcttagtcatacagacttgagtactcgtgaatctgtatcacgattactcggaatggcatcctgtgctctgtctgatgctgaatcatgttccttgctctctgaattgatatcttcaatttcccaaccgcagaagttaaggtgttgtgcacttcttttagaatctgtattacaacaaggcttctggctgcaggattcttagagctaacctcttgctttcttaggtttgaggcacagcatgggggattatgcgctgtaggatttgtatcagcacactgtttacataggatccccactgtaagttattttgatcttattataaactcattgggttgtatcataagtatggggaaaccttggttctaggaatctgaatgatgcgtgtgtctccttttatgttgcatctaattagcttgtgatatgacacctgcaggctgcagttactgcctatacttgactatttagttacttggaaatacaaagtcacgtatttaacattaacatcgaagctcttttggttaggaacatttttcaaataggaagtagcttgcttcacatagtaatcagtcctttgaaaataacgtatttgcaatttggaaaaaggaagtaaataatacgttgacattgcttggtaattttggtgaatacactaatctctctggcatttcttgccttcgaattactgaacaattatggaggtgctgttccttttttttttgtctcatttgttgtctccatttccacctttcaaaatttgcttgagatcaataacatagctaatgcagaagtccgatatgtcttacttcaggtgtcttgattcatcttgcattccattttagtggatgtcagtccaatgtgataatttattgataatctgcacttgtctgtctataaatattgacaccaaccaatcacgggctaaatcttctgtgttaatgtcaaatcacattccagcttaacacatttttacatctgtttttgaattggctacatattttcaatattttatagtatcaaaattaggattttccgtgaagcaggtttctaaagcagttactcaaaatgcggtaaagtatttggtggaagttgttaatttagagactgcaccactggcttctgttgctatggaagctctgggtcatattgggatttgtggcgcattaccctttcttgttaatgattctagtccaggtcagtttattccaagaacttgtctgcaacatgtatgcgagttttcagttgattgactgacttgctctatcagggactcaagtgctggaaattcttcaagaaagattgagcaagctactctctggtgatgatataaaatcagttcagaaaattgctctttctcttggacatatctgttcaaatgaaacgtcatcttcgcacttgaaaatagcgcttgatcttttatttagcctttcacggtcaaaggtgggtttgtaatattgttcgcaaagccactgccctctgtcctttttattagatccggaagaattcaagtagaactgagtaaacctctaaattttgtacatttgttggtggccaggctgaagaaattttgtttgctgctggtgaggcgctatctttcctctggggtggtgtaccagttactgctgatatgattctgaaaactaattatacttctctttcgacggactcaaattttctgatgaaagaagttaaatctttgtctgatgtcaaaactgatactgaggaagatagccgtaccacaaccagagaaacaattactggaaaactctttgacactcttctgtatagtagcaggaaggaggaacgatgtgctggaactgtgtggatgctgtctttgaccatgtactgtggccagcagccatcaatccaactaatgcttccaaaaatccaggttagcgagctgtaatgggaagattctttgctgttgtaacccgcccctgcaccatcacacctataaggaaaattatgagcattgtcattccagttaatttatatgcattacccattcggagccttgaactgttatatcaattactattttatcacaaaagccccatgacttgtgctatgttgtcaactctacaatgtgtagaagcttgtacaaaccgctgtttaactaaaatattttttcgcaggaggctttctcacatttgttaggtgaccagaatgaacttacacaggagctggcatcccagggcatgagcatcatctatgaacttggtgatgcatcaatgaagaaaagcctggtagatgctctggtaaatactctaacaggcacaagcaaaagaaaacgagctattaaggtaaaatctatccatctaggtccttccttcaggtacttcagtttttgtatttgttcctcaagaatttttgttatccagcttgttgaggagtctgaagtgtttcaagagggaactatcggtgagagtcctagtggagggaagattagcacttacaaggagctttgtaatcttgcaaatgaaatggggcaacctgatttaatttacaaatttatggacttagccaatcaccaagcttctcttaactcaaagagaggagctgcttttgggttctccaagatagccaagcaagctggagatgctcttcgaccacatttgcgactgttgattccgaggttgattcgttaccaatatgatcctgacaaaaatgtccaggtacgatttctacgttttgtgctgttactctatatcagcgtattcaagctatatattcatcactggtctggcgactaaaagttgacttatttaaactgaactgagtgacaccatttctagcatttctagcattttttctttcctgtgtataaatcagtagattgttctagtttaacacgagaaatatttagctgttgcacttctacaagctgcataaatcactttagtcatgtatttcaccgccaaagttatagctgtttaagtgataccacttacacctgcctggcagttcatcttgtcataaaaggttgccatagcgtttgtttgcttcttttagtaattgctacttttcatgtaatcttggcaggatgcgatggcacacatttggaaagcactgatacaagaccctaagaaagctgttgatgaacatttgaatcacatcttcgatgatctgctagtacaatgtggttcacggctttggcgctcccgtgaggcatcctgtttggctcttgctgatattattcaaggtcggaaatttgaccaggtgagatcttcgtattttaacatacaaaaaaggaaatttcccgttgcttcggctctgcatactgcatcggtaaattctagtgcatgtataaatcactttaaactctatatcttgaactctggttctggtttcggatgctgttgttaattccttttgcatatcaatttacatacctgccgggtttttttttggattcttgaacctgcttgtagtgaagtataggatatatatatcaacccagctgcgtggttgtttctatcttgtatgtaaacattgttggtctatcagattttctaagtggtattgttttttcacgcccttatgttattaaaaggtcaaggagcatttgaaaaaactatggatagctgccttccgtgcaatggatgacattaaagaaactgtgagaaatgctggtgataagttatgtcgtgccgtgacatccttaacaataaggatctgtgatgtcacgcttaccgaactagcagatgcaaaacaagcgatggatattgttcttccttttttgctttcagaaggaataatgagtaaagtcaacagtgtacgtaaggcttcaattggagttgttatgaagcttgcaaaggttagccctaactttggtagattgatgagtaatcatgcctgtttctcagagattattcttgtgacattggtagtggtacattttaattttatttcaatacagttgagtaatcagtaaacctagattgcagaacttaaccttgtcttggtgtgttctttcagttttactccaaacatgaaataattaatcagtttgaattacttgctagttttggtgaactgaatgtcctcctcggaaatatttatgatcctttaagtgattttgtgctattcgttaccgtttgcagggtgcaggagttgccctccgtccacatttgtccgacttagtttgttgtatgttggaaagtttgtctagtcttgaagaccaaggacttaactatgttgaggtatcgtttactgtcagcaacttcagtttcaatcttcaccttgtcctgaaatcgtattaaatataaattattttatttcagttgcatgctgccaatattggcatagaaaccgagaaacttgaaaatttacgaatttcaatctcgaaaggctctccaatgtgggaaacacttgatctgtgtattaatatagtggatattgaatcacttgaacaattgatccctcgtctcactcaacttgttcggggtggtgttggcctcaatacgaggtcagttatttaaaacgttatatatgtaacgaactacttcatctacaatttttacttgagaaaatctttcttgtttgggttttggccgataatattgctaagtttattacggaaatttatagaggtaagagaacttgagattgtggtaagaagaatccgttgtcaaattaattgcattttaaaaagtaagctttaaatagtaggggccaaagatcatgataatgtaagtagttactgaatattattggttttccatcattttcttttatttggtttgtcatttaacttttactctgatctaagtgaactatgtttcgaaatttctctaccccttttttttccgtactagcttacatgtattcacgtgatttaaggagtatggtattattatttgtgtagctttttgtaatttctactgtggataactttactgagaatctgagagtatatatcttagaagtatataaatccagatgttatatgataagctattttttaccagtgtcctgcctctgccatctaaacccccgaaaaggaaaaggtttagggaattaaataggggatatgattcttatcatgacttgtaaaaagttctcgagagagaaatgaattcacataaggtaggcttaagtaattttaaccattcaattagtgtaatattagtgacgtaattccatgtcgcccatcttcatgaactcagattgcctcaatggactctcgtctaacgtctctaaccattcgattggtttaacattagtgacacaattgcataccttctcgtccatttttcatgcatgcagactgtctcaatggactcgtctaacttctatgtgtagtgtagtagtcttgtctcattttattagatttcgtgtaatcaaatgagaggttgatattttttgaaaatttcatttttcttgacagagttggtgttgccagctttatctcattgctagttcaaaaagttggttccgagataaagccgttcactggaatgctgctgagacttttgtttcctgttgccaaagaggagaaaagttctgctgcaaaacgtgccttttcgagtgcttgcggcattgtattgaagtattctagcccctctcaagctcaaagcttaatcgaagaaactgcagctctgcactctggtgatagaagctcccagatcgcatgtgcgagtctgttcaaaagcttctcatctacagctgctgatattatgagcagtcatcagtcggctattgttccagctatatttatttccaggtaaaccattgtaactgcatactgttgaatctgatgcatgtgaggtattttgcataaggaacttgaaacctcaaaataactaatcagttttggaaaaagatcaagaaaattatggctgtaaattcatacctcccatgttcaactactgtccccgagtaaggtcacatggtatattttttctcttgtaaatatttggcagattttttgctaccatttttaaaacatttccctagactcagaaattccttatagaatcaaaattctttccttctatttgacaatacatgagaagcttacggtggctataaatttcagatttgaggatgaaaaacagatttcgagtctctttgaggaggtgtgggaagacatcacaagtggtgaaagggtcacactacagttgtttctgcaagaaattgtgaatcatatctgcgagagcatcacatcatcctcgtgggcaagcaagaagaaggcaacttttttatctttctcgtgccagttttctctcttcgttgtacttattgatattttgctgttttactcatagaagatttaaactttctttcagtctggtaaggcaatttgcaaactaactgaagtcttgggtgaatcattatcgccacaccacaagagattgctacaatgtcttgtcaatgaaattcctggacgtttatgggaggtgggacaagttctttcattccaattaatatttattttccttttccttgaaggttcagaaaaagttaattgagatactgtagcagcagattaattgaatttcgagagaattatctttgttgctcgactaagagctgcagctctgctttacttgtccctgtggatggatagagctggtgtgtgtataaatgcatttttgttgcactagtttttcaagtcaatacttctgattgcagggaaaggatgctcttttggatgccctaggtgctctttcagtcgcttgccacgaggcaataactaaggaggacccaacaactccgactaccatcttgagtcttatctgttctgcatgcaaaaagaaactcaagaaatatcgcgagtcagccttttcttgtctggagaaggtaagtaaaagactagttgtggcttcctatgcaaaaattttgagatcgatcatgatatctaaaactgctaataatgcagttcttacacagcatttcggttagtggatttatgagtattttgattatatttatcaggtcataatagcttttggcgatccaaagtttttccatgccgttttcccgatgttgtatgagatgtgtaatactgcctccatcaaaacgaacactcaagttcaggcagcaagtgatgctgtcaaaacaggttgttacacgaccactctagaatcccattagtcctatccttcgactgataacactcttacatttacatgggatatatgttgagtagtaactgttagttcttgtgttcttgtctaatccagctgggtgattattaacttagattaggaaatttgaagaagaaatagtcagatgctcgtcaagcattgcttgtttaacaataaaccgaaagttgatcgagaaaatgaaaaccccttacctcattgaatagctcatatacgagttaggtcatgtagcatcagaaaattgtctcagtactctgaacagtccacatttttgttttcagaatcagaaaatggagaagatggacatgtccctcttgaaaaaattatggaatgcgtcaagtcttgcatccaagtggcaactatagatgacattcttagcgcaaaagcagatttgattcatgttcttataatttccttatcacctggttttctgtggactggtactggtttcttctctcactttatcttccagtaaacttttcattaccttaatcaatctaatcttctgtggcagtaaaaatgtctggaatttcatgtgtgggaaagctttgttcaaggtttccgagtctatggactgactccatggatgacctttcacctagtgatgcgacaaaattcgttcatgaggtagttaatcacatctatagttattaccccatgcgtgtataattttaactgcaaattaacttttctgcttgctttccagttatttcactcactagttcctaaactcctggagtgcatacacactgtgaagatagcacaggtatgtttttctctggtttgtattcagtctactacaccgaatgaaaaccgaaacaaatttcgtgattttggtatttctttcttaacggaacagatcattagggggcataaatagcctcatgagctgaaagttaatgtctttattaggttttaatcggggtagcttgaaaagtctcgttaattatttatagtttacttgcatttggagtatcttcttctcgagttagtataggagtgggttcaactaagtccggtttccgttaacaaaagatttgaatcaattatcgatagaatccaatctatgcaattttattcaacaagattcttctacctaccaccagtggtttgcatattgaattagttttgacggtcttcatactagtatttgcatattccatttgactgtagtaatagcctcacaagctatatatatcttgtctttcaagttaatcgtgattgaatgttttttgttataaaaacctcagtttcatgtggctgcttcccaatgcctgcttgagctcatcgaactgtatagcacaatctcgtctttgcatcccgtggaagtagattttaaggctgaggttgtttctttacttgaactcgaaaagagtgaagaagccaagtcgttgttgagaaaatccagggatgctcttgcaaatctcccttcgttaaactaagcaagcacagagaagattttagttttatgcctgaagttgatataaatgggaattgaatctcctactttgtatttgtttacttatatacaagttcacattgatatatatatcttctaagtttttacttttcttccctgatggtaaaaatttattcacggcttttttagccagtctatctacttcttacattcgaggtttgtgagctgagctcggaaacccaaatttcaaaattggccaaactgcaaatcacgatcaaatcaccatgtatttagaagcttgaccagttccttgtgaagagatcgtgtggcttgcagtcattgcgactactacgaatcaagtgtatgattattgtagaggaccactgagcttgggacttctcttccaagtcgatcgacactatagattaattatggtgtgatacttaggtcattgtaatttttggattccgtcctcaacaagataatagttttgtatatctcaatcccttttaaaaaaaaagtgaatcagtaaaggcgcgtaaaccaaacccaagagtaattgaattttttttttttttttttttttcacaagtcgtattattatatcatcacaggcattacaaacagagtaattgaaatttattggagctaaaagtcacaaagacatcaaacgacaaggagaccatgaatgatgtatcgtcgtcctataaccattgtttagaatttagatagctgataatcagacagctgccagttaatatttatgcaggaattctgcgcgcagcctctctctctgtctttcaatctctttcaacagcgcgacatcttcattccccttctgtagatttagcaaacacaagtctcatctttgagttcacatatcaaaatcagcaatctcgtcctgacaaacagagctcataaatgaccatttggaggacatagcttttcctttccaggcctagggttttttgcctggtccttcatcaccaaatcaagtctttgatccatgactcaggttgcagcattcacaaactcggaatgcctttattgtactcacaagcagaaactgatcttccacattaatattctctgcgcaaagagaaaacagatcatctctcttattaggatacgcgatcaaaaaaccaaccaagtattaatgtattcttaatattgagaagaccagacttacttttattgcagtatacgtgacagtgaaaaatcgagaccattttgggaggttatgcatagttattagtacttggtgattactcatgcttcaggattacggatatgtcctttggtttggttatggcattgaatatacaatcactcctatgatagaaaccatctggtcgataaacttgattataatagataaaagcagcatttgaactaaccagaataagcattgttgacttgatccttcacattctcaacgaactgcatccacttggagtttgtgctttggccactgttgggagaagaaacaactcttaccagagtaaagtcaggtaagaagcgcattttcataaacattcttcaaaaatcactccttcacgcagatgcagatccaaagattcttctcaatgtgctgaattc

SEQ ID NO: 288 - DNA, 87978 bp, Arabidopsis thaliana
gaattcttattggattggacttcaactcaatcttatttggacgatttaaaatgatcttaaattctttctcatcaaaggtgttagaacagagaaacaaaaaccatcattcaggactctttatccatttcaccacactattgatcctgaagagaacatacgagctatagggatccctctcaaaacgccggcaagaagagttggctctataagaccaccaagtattttaaattataagtgcttacaaacatatttattaataatgtaccattaaatgttagaaaacaatttgacctttacactttgtagaattgtaggtcaagaaacatagtaaggtaaccaagtttctttctatacctatatgaagtttcatgagtttacccttttaataattccacttttaacttatatctcatgttcatataatatttctcaatacatagcaagtaatggagaatatattagaattcttacatattagaatccctgtaatagtgacttttaaagcctttgtaaaaattaaagaaatggaattattattactttaactagtagcgttgtattagatttgctcaaactttggctttaccgtcaaatctaatagctagtatttttttttctacttctctcaaccttgttctaaatagcgggaatatttttttttggcgggaaaaataaattttgccgccaaaaatttgtcgggaaaattttagtttccaattacatgttcctattagataaaggtaatttggtcattttgttcaagagaaggggtatttttaaaaattgacaacataaaagaatattattgaaaaaggtagtaaaaaatggtagttttgtaaatctccctttcaattatattattttaaattaaagtattattaaaacaaaaataacaaaataatgtttaatttcactgaacagggttagatggtaggacatgtttgggtcgatagtaatacgagacgatatactacgggtgaaatctattagatatgtttaatttcattgaacgggattagatgatatgacgggtttgggtcgatagtaatacaagacggtatactacgggtgaaatcgtagatataacaattaagatacaattacattatcttaaacacaaaacaaaacaaacaatattaataaaaaatataatttaaatttaaattatatagttttaatctagattttaacttattgaactgtatgttattgtttctatatttgtaaacagtaaaaatcaaacatactagttgtacactagaaatatatagatataagagttataaatttagaaaatacaaaaaaattaaatcatatatatttttaatgtactaaacaagttaaatttttactttaaaaaaaaataatagtcccgcggtacaccgcgggttataatctagttttgtttcatttttaaaacaatgtaattttatcgtaaagaagtattgaaatcttggtaataactttgaccttcgttagagtaaaggtgagcattttaaggaaaactgccaaagagtttggggatataagcattctaagaaatggttaagtggaaggaaaaactcaccttttaaagagtaccctagttggaagtaaatctttgatatacattaattaattcactttaaaaagttaaccttatatggtgtaagaaaaagagttaaccttatctttatatgtggtcgtagtttatggacttttgtttacataaggttgatttctagctttcggttttccgccagtaaagtagttttaaaattactccggttatctctgtttttttctcttctccactctttgacaaattgtacaccaaatcagattcttaaacaacattttcaagggatgactcttctgagcactaaaaaaatagattcttaagatctgtttaacaccaggttagtgtcggaaatctaatctcgccttatctaatatttttttcttttgtttatcgaattcattttgaaattgtccaatcaatatcaatagtaaaattatttccgaattttttggttgtttcatcaacaaaatatattttcaaccatttaacctcttaacatattgacgagactgatctggtctaaaataatatttggtcctcaccaacaatgagaaaaaaaaaaccttatctattagtcaaaatatttgagttttgctgtagccaaatttgaaaattttaagtaatgaatatacagattaaagtttatttctatgaacaatttgttgccagtagtctccctatatgctctaaatttgtgattaaaatatttcttattgatgtgagtattcaatgagctgtgggttttatatgtatcgatgaattgttgcacaaacaaagtctagtttctccattttttaattataaagttatgttgattttgattgctaggaaaaaaattgatactcctgaatacttacatatgaagctcattcatgatgggtaaaattttccatgattcaggatcaagcgaatgatttattagcaatgaagaaaacttttactaagtctaaatggaaaccagaggaagatagaattttgaaagattatgttattcaatatggtgatagaacttggactcatgttccaaaacgcacgggccttcctcataatcctgcaagttgtcgttttcgttggatgaatcatcttaagccaagcttgaaaaaagggccctttaccgatgaggaagagaagcgtgttctccaacttcatgctgttttggggaacaaatggtcacaaatggctagagaagtatgtaactctctttcctttttttttcactctctacattttcatcttcttttactgtttgatttaaacttttgtttctttaagttccctggtcgaacagataacgagataaagaatttttggaacgcaagacgtatgcgattgaaaggaaagggtttaccagtttaccctgatgaagttcgagagcaggcgatacgtacagcagcacaatatggtgtaaaagttgaattattgaatgctcattatagtcaagactcattgatggcaggcaatgtcgagaaacctcaagaactcaataacttggcactcaatcaatgttctccgtattaccagtcaacgcttgccaatgttcagcctagccgcaatcgcgttatggaaccagaaacaacatttcctttcacgggtggatctgccatgaacgagcaaaaccctactctcttgtgtaatccttacgtggagagcactcaagaacagttacctgacagccatttgtttggaaatgttacatattcttctcctcctatgcctctcattcacgaggttgagaacttggagctcccttcattccaaggctttgattttcatgaagagcctagcagttttggagcagaacaatataacccaatgctgaatcttgagccacacaacactttggtccagtctcctctgataggccagacaccaacagatttcccatcatcattctatgatgaattgttggatgaattgttggaatcagttgttaacggttcattaggagaaataccgaaaaccgataccagttcggagtcccaactgtttcagtcctctctacgtagccataccgatgctacaccagacattgcaaacacaactggtaaaccttttttagtctctacgcattacattacaatcacttcattttttgtgtgttcaattcaagaggtttccactaatctttatgcatgacaaaacttcaattttgaaacagatttaggttatgttggttcaaatgagagaaacacaacaaatgatgacgattggataagactacttctcgatgagggattcatataacaccaagtagaagaggtttctttggaaggcataatacataaatgatttttctctcgtctaatctctatctttcaatgatttaagttctttaatcatgtttttgcatttatcagtactctggctaccaaaaataactagcgattaatttcgatttttataaccaagcatcttggttgagtgagatttgataagcttgtaagaactcatgtatccagatatttattcatattatttcggatattttattctagtatattttcttaagagttttatttatttcaatgatctcggaacggccaacattcggatatatcctcaaatattgggtgttagttacctacttatatgtgttgttttgttccctttgttcccgaatattcttttcaaatattgggctgggcattttggtttatgttcgggtaattgtttcgatttggttagatttagttttaatacaacgctaagtcgctaactgaactcaaccgaacttagtttggttcggtttgtgttagagaaaatttatgattggttcattttggtgtggtttggttttagttccgttaaaaaaatcatgcaagtttatcctacaacatagcatcgattactttaactgttcatgtttaagtctttagggaccctctgattagagataatcaaactagttaaatttagtctaattatatttcaatattattttataaatagaataacacattgatttattagttcaggttgagaagaaacataaccgaatagtttggtgtaagccttggatggttcaaattttgatggttcagtttggtttggttcctttaaaatgtccacccttcattggaaggctttcataaagcttcattttctaattaaattagaaactactaaatcgttatgcataatttatcatatgccacaatttattataaatacattttttatgatatgttttatattctttaaagagagaaacttcgaaattgttaaaaattacatgaaataccaaagaaatgtttttttcaaatacaagaaaactctaaaaaaaataaaaaaaattaattatgattatttttactatccacacaacaacaaaaatacatctaatgattaaaaaaagttccaaaaaagcatgttccaaaatctattatcaaatatttgggaatatctttttgaattaaataaaataactctaaaaaagattaaaatgactctggttttccacatttaagatctttttgacattcaatggatgtaaaacaatttgactcataaaagaccgaataaaaagattgtacggttaattaaaaaaaaatcgaaaatggttttcgaaaagaaaaaaacaatcgctattaaaaaaatagtttgagacaatataaaatgacatgaatttgaaattttgactcataacatattttagcaatgatcgttcctctatatcctctcaatattcagttcaatgtgtaataatgtgtgatacaataagaaacttttagggaagacatcaaacattccttcaaaaatttgacaaaaaaaatatatatcaaaaaagaaattgataaaaaggtaaactgatactagagagactactatcattggaatatgaaaaacaaaacaaaacataagctctcatctaacaatttcacaaaaattaaacaattggtgagagttcatgggaggttctcacaattggaaatgctcttctattctagttctcattaagtatttgttttagatcttctcttgttttctttttttttttggcaaaagcttttgaattcattcacatgaaacaaattacaaagctagataaatcttctcttgtttaagtttctgctttagagatcaaaattacttttgatttccatttgtttcgtatacgaatttagatttcaaaagttcagaagcaataagccaatgactaaaattacaacgtaaatactaggcaaatagtgtgaatatgagaaacgaagtccattcgatcgagtgtgaatggaacttggtcaaactaattaatttttcctttcaaactattaaaaaaaaaaagttttcaaagaaaaaaaaacaagattacatttacaattttaggctatattttaatcatcttattctattcagtattaaactatttattatgctctttgttttcttaaaactatttaatacgttttaggttttaaaagtttcatattcattgtagtttcaacactacattgttttcaatgagactattttgtgtgacgtgtttgcaagattttttaaattttttgataaaatttcagattcagacttgcacctttgactgcatttcccgtagtgatttttgatatttccttcaaatgttgcaaacaagggcatggccagtaactccaggatgataatataattattaacgatattagtttggaaagtttcgaatattcagtttcagaaaatctgtcaaaatatctagacaatatttgactgtatctatattaatttaaagttaaatattgaaaattagatattggaaacttaaaaaaaaaaaaaaaaagacttggcaacgtgcttgcattgtatgatacattttgaatcagtggtggttaatataaactagtcatatctttaactcttgtttacccaaaaaaagttaaacaattgctgcatttgaatgtgtgttgcaaaggttggtaaatattttttgtgctatgtatattgtgtgtattttttaaataaataactaaatagttggttatttcttttttgggatataaaaataccgataaaagctattataaaatgctcaaaacacacgattagagttcgtggacttattatcagaattattttgatattagcccaatattcctacaattgtgtttttgaaataaagtagattttattgtatcgaaaccatttcctcaaaattagttaatctaaaacatatataatacgacaattgactgattatgtatttatattatagaataaaaactgttaaggacgacgaaaatagggaaacattttggtcattattcattcataagtttgacatccaaaataggtaaatagttattttacttaatatgggggttaaagataaatgcaaatgaaaacagtgaaatcttctaatccgacctcttctctctcctttggctaatcacaattaattcggcttcacaatctccacaaatccctactctcctcatagtcatacatagaagagagaaagaataccattagtcataaaacctttgcgtaaatctcgccaagattttattgtttccataagccgaatgcaagtaaattacatttcttaatactctcaacagtaaataacattttctttcatctccacagaagtaaaagagtatgaagagaacaagagacctttatggtgatgaatcttcttcatcggaatctgaagagtttcaccgggaaaaaatccgggtgaaggtgaagttaccggaagaaagaagtgaagatgaagatgagtctcctcagcctcagaggaagcacttttgtgtgatttgtgagaagcagtttagctctggtaaggcttatggtggtcacgtgaggatccactccattgagtacaataacaagggaaagatgaagaagatgaagaagatgaagttgaagaagaagaagaagagaaagattggtttggtgaagaaagagaaggagaaagagatagatctggctaggactgacgtggaaggtaagattaggtgttgtctttgtggaaaagagtttcaaacaatgcactctttgtttggtcatatgaggagacatcctgaccggacttggaaagggatacgacctcctccaccatcggagaagttcaatctaagctacttggatgatgatgtcgatgatgaagatgaggatgatgatgatgtgatgagtagatccatgatgatgagtgatgtacccgaggatgttcagggagctgcttgcattctaatgatgctctcttacgcttcaagaaattactgggctgggatagaggaatcaccaaaatccgaggtaagaagttcgagtttctacaaagatgatgaaggaaaagataaagtattaggagatagtaggatggatgaaaagaagggtttgattgtagatatgaagataaagatggaaatggaagtgaaggtgaatagtcctcgagatgaagctaagaggtcattagggtttgatctcaatcagcctccttaccatgaagatcatccttaattccagttggaactagttcaattggtttcgcagttcgatttcaatggaatggagtagattaaagttttaacatgtttctcaatgaatttacatcctcctacctagcttttgtacataatgaaatccttgtttggttctagtcatatttcattgctgttttttccttctagtccttttcttctgtgccaatttctcttgaatattttctttaatgttttgtgactttggtgtgactagaataaagttgttatgcttttatctactgaatattttcattcacaaggattgagatttctcaagttgtgagaattttcgtaaatcgagtagttcatatgcatcaaccatatgatacggatattccataggtgtatcaacttttcacatacaaaaaatgtataatttaggtgcatacttagagatagtaactaaatatattattgttaagatgtcaaaaatataattttagttattttaccaatataagttcaaacacaaccacatatttgcaagaaatgccatcgtaaccaaatacaaaatctttttaaaaatcttaacttattcaaaatgaaaacatatttctatatacaatgaacaaaatcttctcaaatatctaagggtctcaccggtgcaacatttagaagaaaaaaatttctgtcaaattcttctaaactcacaaggagagagtaattatctttttcatttttttttctatcaaagacaagtatttttttagaacaaaagcttctacttcaaaatggtggaagaaaacatattacttttcctttgtggaaatctaaagaattcaattgaaaagattttcttctaaatattgcactatcataccttaagttcatccacataaaaactttttaattaaaaataatacatttattcacattcaaggccgtctccacgaaaatgaaaggtaagtaaatgttatgggtctataatcaattttttgataagattaagtgtcatatgataaaaacgaataagatttatttccttatcataggaaagacaaaaaacataaatataactatatagaccctccacaaaaaggatattacgggtctgattggttgtcctacttagcgcaagagttgaaaaaaatacaagaagtgtaaaaagaccgaaagctaaaataaaagtaaaaactacaataaaaacgaacatcgaaaaaacacaagcgaaaaactcaacaaacaaagattcaagaagaaacactgattgcgaactacgaagcacaaaaatttgcatgatttttcaactccaaagagtttgagtcctcatcgttgttgcaacgaacaatcccaaacctaggccagtcttcaaatcgatatgatagagacgcttacagcttctctaaaggttaaagcaaaaattgggacaaataaagtggacttaatcatgcaatgcaatatagaagataagaaacatttttgaataataacaagaaaatgcatcatttttagtaattcatacaaatgaaggttaaccaagatatcttccaaatcctcacactttatgatttcctaaaatcttaccattgaccaatatgaattttaagggcaactttctcaagtgatttatgggatacaagtagtcttgtttgaaatgaacgtccttcataagaggatagtcttttatcaaaaatgattacacatttctgaaaattaaattttatgttcagagacttctgcatattgcatgaaaacctttagcaatgtatggacattcttacacttgagtgttgcagtgaagaagagtatcaacggtagatttcaataaaaatccactcaactttatcaaaagctttgctaatatcttaatttaaatgccacagaagattgggtagcttttttagtatgctctgaatgcaccaatttgcgatatcaacatactattagtaatcaatctacaaaaatagaaacagactgaagtttatgaaattatacaaatgagcttagaaataagcttatacgcagcgttgcataagcttatcatcctataatctataaccccaattgaagcatcagtttggagattaataagagaaagagattaggccaaattggtaaaggatagttattgtagttgactaattgaattgtctacctaaagtgcccaaatgtcatagagatgaaaaaatgtgctattgggccaatttctctatacaaaaacattttgattttttgttagaattgggctgattcttataaaaaaaaaaaaaataggtgacatatcagatcaaagagaaaaaaataaggtaggaagaaacaacaacaatggcaacggcttctcctccatttatctcaactctcagcttcactcactcttctttcaaaacttcttcttcttcttcattttctccgaagcttcttcgacccctcttaagcttttccgtcaaagcttccagaaagcaagtagaggtaatcaatctcctccccaaattcccagaaaggattgatttttattgtacaactgttagattgtgatgggttctcgatctaattgaataactcggaatcaataatggccacaaaaaaggactcctttttgttccttcaactttcgtttttagctcttcgttttttctggatttgaattcacaatttgagcttgatgcttgtggatgtgtcgttgttattgttagatagtgtttgatcctgatgagaggcttaataagataggtgatgatgttgacaaagaagctcctttgtccaggcttaagctcttctcaccttgcaaggttcttaaagacacttccttttatctatactttcttgtttttttactctaagaatcattggcatgtcttttactgtgtagatcaatgttttcttgaggatcaccggaaagcgagaagatgggtttcatgatttagcctctttgtttcatgtaagttttcttcctcacaagtttaaagcttttgcgatatttctcattgtctcttgatgcctttagtatttgctatttgtatttgatataggtgattagcttaggagacactattaaattctcattgtcaccatcaaagtctaaagatcgtttgtctactaacgttcaaggagtccctgttgatgggagaaatctggtgagacgactttcgttattctgtggcctgtggatgaagcattattctaatcctctggcctgtgtcctattatgcagattataaaagcacttaacctttacaggaagaaaactggtagtaacagattcttctgggtgagaacactatacatcaatgatttcttttactacatttcactgtgatgatttgaacttatattctttctttatatgtaaagattcatttagataagaaggtgcctaccggggctggactcggtggtggaagtagtaatgctgcaactgcactctgggcggcaaatgagctcaatggaggtcttgtcactgagaacgaactccaggattggtcaagtgaaattgggtcagatattcctttcttcttctcgcatggagctgcctattgtaccgggagaggtgaggtatgttttgcttagagtttacggtctattttgcggcattctactagttagcaaatccttgttctgattcagttcttttacacccatattaattgggctttgtgggttgtaaacatgctccagtttattttgctgaattctaatctaaaggctaatgcagattgtccaagaccttcctccaccttttcctcttgatcttccgatggtgctcataaagccccgagaagcatgttccactgctgaagtttacaaagtaatcaactgaaactgattgatggatattttgattcaagaagcttttcaggattttgtgacttacgcttttattttttagcgtcttcgtttagatcagacgagcaatattaatcccttgacattactagagaatgtgaccagcaatggtgtgtctcaaagcatatgcgtaaacgatttgggtacgatctatatgcatatgtcgcatctcccttcctttgccaagaagatagccacatctttaaaattcaagattcagtctgatacatggaccatgaattacatttacgcttttgacttttccagaaccgccagcgttttcagttcttccatctctaaaacgcttgaagcaacggataatagcatctggacgtggggaatacgatgctgtgtttatgtctgggaggtataccttttctacagttttttttgttatttccacttcattgagaaatttcacaaaatactgtgcatcacataggagctcatctaatggaaacagtgtgctactactgtagttgtcttcccaaattcatcttaacaagctagtataagatcatatataatgagctgagtactgtttactagaataagagattataaatgagttgagtaattgtgctaattttggtgggatgaatgcataacagtggaagcactattatcggtattggttcaccagatcctcctcaatttatatatgatgatgaagaatacaagaacgtgttcttgtctggtatgctcttcgtacaagtagtgtggtttctactcttctgaatcttgtacatgtaaggaactaattccaagtaaaattgttgcagaagcaaactttatgacgcgtgaggctaatgaatggtacaaagaacctgcttctgcaaatgctactacctcatccgccgaatctcgcatggatttccaatgagatgttacaaacatgtaattttttgaaaggattgatttgagattcctacttgtgtttcgaatagtgagtggttaactaaaggagaagatgctttaaatataaattaaaagttttttaaaaagacatattcacgaatgataatcaaagagagaagcaaccacacatcagtcatgaaaccattttctgtcttctttttttcttgttttattactttcatttccatatgaaactcctatgctcttacagagaaggagacacatattgtctagacaagctaaagatatcttttccttcaaatggtgaagtccaatctggagaggtagctgcttgttgtgtttccacgataacaccagcacctgaattctccatagatacaccgttgctgttgttgagtctacctcccatggaaccatttagactgtaccggttcatgttctcatcatatatttggctgctgctctttaacccggaccagtttccattgactctactattttgtgataaactttgatctagactccagtctatgtttgtgtagtccactgaaccgccagagatccaatctataggtgaagatgcacccgatgttccagctgaaccaaccgcagagaataatcccagcgaagacgcagcagatatgggtggagatgatgctgtatttctagtccattgcccgccattccctctggccatactaccatgtggatccacttggttgttgttagtgaatcgcttctggttttgatactgaagttgctggtagacctgatttggattcagatggtttggacttgggcttcgcgcactagggatattatgtgtttgcatgaacccatttgacttcattatctctatgctcgctgcaggatgccaactggtagggggtgcactcatgcttgaggttggaacgggatttgtgattacaacctgtggccgctgcctcatcaccatgactgattctctatttgcaggctgctgctgctgctgctggaagttcttaaattcatttccactagctaaatagcgagcttcgaccctcacagcaggctgaggtgacggtgatggcgatgatggcaaagagtaagaagccgaaggaacctgtcctgtggttggtggccaccttttatcagccaaagcagcagattgctgaggttttggccaatctaacttcagttcgggtcgtttcataggctgagccaacattttgttcacggattcagttgtggagggtgattttgtatagttaaagttcttgtcatctcttgttggatgtaagccaggtgacggaatttctgacctttctacatccgaattctgataacctattcctactataagttttccattactgggtgtaagaggatcaccacattcctcttgtttcactggcacagaaaactcttcatactttgtgcctttcaagacttcttctgctctgtccaaatcaccctctgcttgaacaaccgcacgctctatttcctgccttgtacacttaagttgcaactccatttttgtaatcctagctagctcttctgttatgtctattttcaaattcccaggactctgaatgctttgcttctctatttcttcctcaagcctatcaaacaaccaatgaacagattcctctactttaccatcattcatcattaatgccgttgtcgcatgctcttgagatattcccattgccacaatttgctgtgtacgggcttcaagctttctggaaataagatatgtgctacacttctcattcaactcctgagccctcctctccttctggcgttgatgttttctctcattcttttgacgaactttttctcgcttgtcattatctgcacctggtatcacctcctgcttaaggggcagattagttgttttctccttgtgatcttctgactcaccagaacagctaccattattcgaaactgaatcagactcaatcccatttacatctgcctcatctatactccggaaacgactatactgtaatggtgagatagaagctatcgacactgaatcaagagcttgaaatgttcctaaaagaggattataaccactagctgccaagctgctattcccattaaccgaaagtgaaggctttggtgatgccttttgagcttctttaccagtttttttatccttagactttgactttgttgctggagacatctctgcaaagaacatcaatacacctaaaaaataccaagaaacgagcaaatagttaatttgatactccaaaagctaacatgagacttctttagaacctttaaaactacaacacaacacatatcttagctaccaaaactatgaattaggtaaataaaatggtgaattgatacttttttccagaaaaataagcaaattcagtcttctatagagactcagcttttttgctaagccaattccagtgactaacaaaacgatgaaacattcgaaaggttccaattcgtaaaacgatgaaagtgaattatgaagaaaaattgggaacagattcttaaattgaccgacatagaccaaagcttctgattcttctacagatggaagcaaattgaagaaatatcggagaagattccagaattcggcgaaatttcacgaaatcacgaggacgatttaaacgaatacaaatcacgaattgagagagagacgaaagcgtagggaaatcgaagagaagaagctggacctgtagttaggaagaagatgatgattggagatcgatagagaagatatgtgattttgttgtcgtcgtcgtcgatggcgagaaactgaatctgcagagagagatgatcttttagggtttttgttgggagaggaaaaaggtaaaatggaaggagtttttttttttttgtctgtgtgaatatgtaagccaatggagatgtaacgaatgtcactgacttctttcgtttttttttttttttttcaactcttcttttattaataactatgaaatttgtattagtacagaataatcatcactatcctaggaagttgtccgtactaatcacatttattataagattttaattgattttctatgctattttacgaaagatcgactagattatgtcgtatttactagattttctgttgtattttactagattaactctttttttgtggctctatttctctctacttttggtggaagtagtaagactaatgtgtttgttttggtgctatactatgtacaagccgatgttggaaatgatcttggtagagtgagttgcgtcgttgcttccattggtttgttgttgcttggaatggtggttcaagaagcgtaagtaatccttctatagagggttggagatctctaggaagcgaaggtggtcaagtggactagactccaaccggaggcaggattggagtttcatcgaaatgtttatgggagtacctcaaaccagaatgaacctttgatggttacgcctatctcgacccgaaaaacataaaaaatgaaggttaatcggaatgcgcaaagatctaatattcaagcttggacaaattgacttcataagaaactaaacctacttactaagtttgtcactaactttagtgattggaaggagacgacatatagctcttgaaactctatttacatgaaaaattaccataagttacacatggggaaatctttctagtgagtgaataagcgtatatgcacttggccaaatatatactagcaaagatgtgtacaaccagtaaactagagatatatctctattacagtactggttcatgatcagtgattgttatagatgaccaatacacatttctcagaaaaaatgacaaggaacataaaacacaacacaagcttttattgatcccatacatgtaatgacagaggaagaataggcagtcccctgccttcttgggtataaaagccccaatatacaaataaacaatagatgattgttgtatacgtgtatatatgaatatgagagttggtaagtggtaatcaatccatcatcttctctggaaattgaaagctttaatggcgaatgcaaacacaagggagaagaagacgcaaaaggcgacaaccataatagctgagacacctaagaagtcatgtttatatcccatcacatcctcaagcagttgtttcaccatcacctgatggataccgtccgatagcttcaccgatctttcatcatcaccgtactgagacaccaatagaccgtacagtgtccaagccaccgggtttgcccagtagtaccatctccaccacagaggaatcctctgtagtcaaatcattcaaaacattagtatttctaaagaaataaaagataagcttagtaatgtaccttgtatgggatcatgaagccactgaaaagattccagagcatgtagaaaggtgctgctataatcgaggcgacattgtggtttggggtgattgctgtcgtcatcatcccgtagaaggtgaagtacattatcgaaaagtacatgaagaataagtaccacaagaacttcaccgcggaccattcgaacgcggccattgcatagaatatggtgctgtatattgtggattgtgctaacacgtatggaaattctataaacacctgcaaactcatacaatttttaggtttttaaactcaaaagcggggatgagaaagatagaaagataataaacatatctgtgacctgtgcaaatgcaaagggaagtgccgagtacattcccgctgctctctcgcggtatgaaacaaatctttctatggaaacaacgggctgtgcagcggttgcattggtgattccaatgaagagaaccgcagcgtacatcgatcccattgcattaaataactgttgttgagtgtccctatatatgaagaaatgtatcattggttaaaggaatcatcactctttggtgatagcaatgtgccactttactcataccttttggagccaaatttccaacatattgttccaagcatcagcgagataaccacggtgtagaagaatcgaactgcagtgtattgtgggtttcgccaatatgataggttttgtttccacaggcaagcaacaaactgactatacagtgactgagagtatctggttggaaactcgatttcttttgcaatgttacttggcttgctgagtacttcgatcagctccttgttgcgtctgcagtagaacggagacataaactaaggtaaaccgaacttatggaaagctaacatgcatagttttgactaaatgaggaaaggcacatactgacaaagatttgagttcctgtaaatttcagcaaaatcaactccaagccggtgttcctcggtagaagcagtgacatcaagcatccatgctgccggattatggccaggtttgatcttttgcaccccttcaattgactaaagaagaaaacagtagcagtcaagagactttattttacatgttaaaaattaattgatcaagaacacaacctacctcgaaatacttgataagctcacaagacttctggccaagtggaccggcatatatgagttctccaccacgtttcatgaacaaaagctgcattaacaatgaagtttagagatagagactaaacaatcctgcagagtctttgattcatctgtttgaagaaaccaacctcgtcaaatgactcaaaaatatcaatgctaggctgatgaatcgtgcagacaatggttcgccctgtgttaacaatatttcttacagtcctcatcacaatggcggccgcccgtgcatccaatcctgaagttggctcatccatgaatactatagaagggtttgcaactagctcgacagcaattgttaaccgtttcctctgttcagttgataagccatcaactccaggaagaccgactaatgccccgcttaaagaggtcagctccactagctccatcacctcatgaacaaacgcctccaagaatttgaagtttagagatgtcagcataatccaagaaaaaacacaaaaatgatcgaaagataatagaaattatgttaccctttgtgtctctgagtcaatgtctgctggtaaacgaaggcacgccgagaaaagtagagattcaacaacagttaggcatggagagtgaacatcattctgctcacaataaccagaaattcttgcaaacgtttcctgtcttttaggaaaaccagatatgtacacatcgccttctatagttcctccggtttttcttccagctaaaacatccatgagcgttgttttaccggcaccacttactcccactaatgctgtaagcacaccaggtctaaaagctccagtaatattcacaagtagctgcaacctatcttctagtatcccttgttcttttagtccctgaaattttagttgcattacaagtagtttcaaactgatatacctaaacagtgtagaaaacctagtacataccaaaggaacatccacatagtagttgatattgctgaaagacagagatagtggttgaaatgggagaaccatgcctcgattcttgaaatattttcctgcagcaaataagtataggcattagcttctttcagttcagtaaacttataagaaaggaaaacatttttgttcccttaccatgtattgagcctgaatgctgcaagtactctcttagttccacaacaaactcatcgccttttcttttcttttctctctcgtctaactcttctctggatacaacggcttgaaacttaccccatgctatgaagagtttacaaggatatgaagaagattagcacaataatttacaatggcagatgttttaggtgtacagaaaaaaaatgagaagcttacggttgaggtgagctaaaaacagcgtaaatagtatattaaaaagaactgtgtatccaagcaaggcagcgacaccgatccaataccagtagttcccagagaacaaacttctttctttcagcaatgccaaaccaagagagtcgctagtgtgattcccagcagtcttcagagacaagaaaaacaaccattaactacaattgtatatttcaccttctaagaccgaaaaagttataaatagttttggttatattttcaccttttgccaattatgaccaaggaactcattcacagaagctgcgttttgagcatacatcaatggagaaatccagtaaccccatatccaccagcttggtatgctatctgtgaaagcgaacaagaaaatgaatattcatgtggtgaaggagagagcttaaggacttcaagaaagagtataaagacctctggaaattataaatcctccaagagtcatgaccacaagcattgcaaaggacccaaacgtattggcaactatcatatgtcggcctaaagaacccattacgcggaaaagacccaacgacatctgatgcagagagaaatacagcaagaactgctgaagaaacctgaagattagagaagttcatagttaacttttttatgcaaccaaatcctttcccaattcaactttttacaagaatgtaccttgagaacaaaggatcatatccaattgtataatatgttactgccacccatgtggcagattctattattgaagtagggatactcaaaagccaggaaggtaatgtataagcccagcttgggtaaaaatgcaagtctctgtgcttataaagaacgggaagtttggctactagcattggaacctcggtgaatccgttaaagagaatgatgaccatggaaaagtaaagtgacccaagatatatgttgccatcatcaatagtgttgtgatgcattgttgttcggcaaaagacagtcatcgtgatcaaagcaactaaaagaagctgcaaacgtgtagtatgtggagacaatgaagttaaataaggcacttaccattccaacaaaaaagaaaagaactagagacatataattgggagtcaaacctgaacaaacttgaacacataaataaatgcattttgcttcatcagttgcttctgccaggcaaagttgatcttgagaagttcactcttcttaacaccatattgggatgtcgataacgcggctgaatgattgaaccgtttatcaaatggaacctcaagtttttttgccaacttcttaccagttggatatgaacggaaagcttcagcaaattttccaggaggtacatagcgataaggccggaaagggactgaccagtactgctgctgatctttctttgaggtgacctatcaacagaaactcatttaaaaaaaaaaaaaaaaaacagtttaaattttctgcttcataatcttttataaatcttacctcttgcaagaaatctgcaacattttttctatcagggcaagtaaatcccaacgaagaaaagaaatcaagaacctcgtcacgaggtccctggtatataatctgtccctcagacataaggataacatcatcaaacaactcgtaagtctcgggagacggttggagtaaagaaatgacggtggttccttcgagcgcatgagtagaatgcctcatatacattataatctgatgagtcgtcgaactatctaaaccatttgatatttcatccatgaaaaggactcttgctggaccaactaatagttcccctgtgaattcaattagcactggtcagtatctactggttaaatggtcaaacataaacaaaatcaagaatgggaagacaaacctgttgttagccgtttcttctgtccccctgaaattcctttaatcatctcatctccaaccaatgtgtccgcacatgtgtccaatcctagaatctttgttggatgtatgagaatttcagaaagagtttgaattgaagaaataggacattaacctgatagactttgcctatacttctaacaagtaagcattacaacatttttcaatactgttttctttgttttaaagatattgtttgatatatgaccaaaagttaaaaggctatggagaataccttcataacatactccacgacgaggcttgtctccattcccccgagagctaaagactgtggaggattggaaaaaccgttacgaatcaagaggatgattaaatccagaaaagaaatggactaagactttgactaaaacactaccaagtaccttcataaatatatcaagatcttcatcaggtacaattcctgcaagcttttcccttcttgctaactccaaaagcatatctgtgttttcagtttgttgtatatgtcaaacaccaactcaaaaccaaaactaatataatgcttcttagtacttaccatatttgaatccaacaccttgacaacgaccagcaaactcaagagtctgcctcactgtcatctccgccacatgccaatcctgttggctcacatatgcggacgtccttggcgcgattatctctttgagatcgtagccattgtacgttattttccctgatgtcttcaaagtaaccaaaaataactcaaaaccaagaaacaaaacaatcttctaatggttactaattgaattcggtcaccgacggtgtacctgaagattagttccaagacgtccagctaaagctaagagtaatgttgtcttccctgaacttggaggacctagtagtagtgtcaatctaaagagcaacacaaagaatttagacaaaaaatagtaaaaatattaatgaaaaagcagcaaaattagatgtatataaattaccttgaaggtctaataacaccactgataccatctaaaatcgttaatttgttcctttttccaccaatcacatgaatgttcctcaacaaaccctgtaacaaaaatcttcttaattaccataattgctcacaacaacttaagaagaagaaaaaaaatgagtcaattgtttgtaattacttctgccatgttaatgatgaaattgggaattgttggtaatgctctgcttccaacatgaacaaatgattctaccatcagattctgaaatcgaacttcaatcttcggaaatttcaaatccacactgttcaaaaaaaattcactcaattcaaccaaaactgaatgattttgaactaaaattgtaagagagaattgagagatttacgcgtcgaatctcttcctaacacgagcgaagaactgttcaggatcattttcaacggaattcacaagacggtcgagaagaagacgttgttcgctagcttctaggttaccaatttggatctctttaggctcaccaaccatatctctgaaaatcccgcggcggattcgtgaataagttggaagacgttgtaaagctgcccaacgaagctcttcttcgtcttcgatttcgtctttaaacgacgtcgaacgcgagaatgcgttctccgccgagttccacattctccgcggcggcgcaacagaatcagagagagatgataattggagaagatgagggaagagattgcagtgtagatttggttttggtttgttctccctctatctcttgttctgtgtcgtcgtcgtcgtcacattaatctctcaccactagacaactggtaggtgaagccaccattaatgcggaaacttttctctctctctttctctctgtgtgtgtttttttttgtacgttaaagtgaaataacagttgagaagaagggaggctcattaataatcacttagcgggaagaaacaaattgtttattatttaggtctatgtggatataatgcaagagattatagtctgttttatgtggattactaaaaccgaaataaccgaattaagagataccgaaccgaaccagataatcataaacatccaaatagtgtagttcatcttttataacaacttggaactaaaccgaaaacggaatgagtattcgaactacttgaaatacaattgtatgattgtatctcataaaaggaaattatttttctaattgaaatttcaaatttatggtttatgtacaagaaattggaaccaaacaagataatgaactttaaagaatgataaaaacaatttaaggagatcaatatcttaatatcagaaaatattagtcaatgtcataaaaatcagaaaatgttaattatatttatgtttgagataatccaaatattcaaaactatatttataaaccagaaaatttagttatgattaggctcaaaataactaaaatatatgaatgtacatacttatatgtgtctagagtaaatattttttgcaaactaattcattagattgaacaaattatttagttcttttttccacatagtttatgtacaaatatttaattcaaaccgaacccaataaaatttggttatatgtcggtccgaactgagagataaccgaacatagtcaaaccgtaaaataactaccgatccgaaccgcatgttttttggttctatatgaattctaaaccccttaaaacaatttactcaaaatcgatctgagccaagtcgattatcggatgtccacgttagatttttccaaaagaaaaagagtagaataaaatagtcattctcacaactaataaatacctacaatttacatacttgttttgtattattatctttgacatgtgtaatggggacaggtataaatggaccgttagattagagggatactagtctattatatactgtacctattttgattaatttattgattctagcaacattctactttcttctcaccgaatttttccttctactgttttttaattaattatagcaatgttttttttcgaacatttcaaacatgtatttagagtgacttgtaatctagaaatatcaagatgagctggaatcttttgagtcaatttggtctggtctggttctatcattttcattttaggattagaattttcaactcatgtattaatggaagtatgaagtcaattctaacatgtttagtggttattggttagaataaattatgcatcattattggtcataaaagatagataaagtttttaacgaataataacaaaataattaatagaaatggtaaaaaaaaataacagtatacaagtagatattagtctctctctctctttttttttgtctttcaacaaattgttatgtgattacaaatagttttttctttttgttttcaagaaacagaaaataaaaaataatgatatacgatgacgaagtacgggtctggcctgttttgatcaaaatcagatctactctttgttaacattaagagattgatgactagccatcggatccattctctttggtttcatggccgatcatagctgatctatttctttgaattttaagctagcattctattaatgcttttatttcattggtcctctcttgttgtaatctcctttcaaactatgtagataattttttgttgaataaaatttaacattccaaatttccaaccaaaaatctaatatcttaaggtcattttgtttcctcccgagacctttcttcactttaggaggtattgagactcaattcatcaagcatctaatctaacgagacaaatgaaataaaagtttggttgcgggttgatgacttttgaaagatgtgacagtcttgttcttttcctaaaaactaggagtggatatatcgtaaaagtgtcttaagatgccaaagctgagagagtgagtgttgaacaacctgcgttgaatcattgtagttcaacttgtttatatccaacaatattcatagagagacataaccttatgtcattccatttagtttgtagaagtagagaagattcgaacatgcatctttaaataaacgaagaatgggaatttaaagagaatgcaaagaaagaaaagtagagtagaggccaagaaacataaactagattatacatctctcgacgattctacttattatttatctcttaagaaatttatgcatatcccccaacaaaaccaaaaacataagattttcaaatgtaaaaatgtcgatgaaacatacaaaatttggcagtgaaagagtgaaaatcagcttcgtcggccaaagatttgtctgtcgccaaccaaaatattaatattaatggttacaaacaaagtatgggggtttcttggctggggcatggtgctaatcattatccagaaaattcaaacaaactgtcacagaactcagcactcacatttaatgaaaactttgtatttgttcagtcgaataaattaacgtgtagtgtttcaaaatgtgttaaatcaatacttcatcatgtgattgtcttgattttatgagtttatctaactaataaagctattttcacagtaaaaatagaggcaaatcatttggtggaaatagaccatattttcagcatatttctacatcttgattgacttttccaacatcaataaatatgtttttgcagcacagttttcaaatatagaatttctgtggtatgaaccatagtgaatatgtgcatcttatccatatataaactaaaatgtataaaaatatacaatcttgtttaacaatacaatcagactgtaaacaaaaaaaattcaatagatatgattgattaatacatgtgaaacttaggcatacgacttttgagcgaaccgaaccgttcggtttggataattggtttttcgagtatctagttaggagataagactgccaaatttaaccgaacaaaaattcggtttggatcggttcagttatcagttaactcagttcggtaatgtgtctcaaatccatacaaaaatttggtttgtatagcaattttaaagaattttggtattagtttataaaattggatatgatttgtttatattagtttaaaaaattagaaaaaatggttaaaagattgttcgattaaccgtacctaaccaataggaaaagttaccgatcggaccacttctattaatcgactggttaaccgaacactcaaatctcaattaggttctgttcgaaaacacatcggaaatgacgacaggaaaaaaaaaaaaaaacacacacacatcgacgtagttgtagtagaatcgatccaaaaatgttaagtagatattttccagataggattgttgatgaaaggggcagatgaagaatgtgtggctctcctctctttcacaacactccacaaaaccctttgtctcctcctcatttggagatgtcactaactcatcttctctgattcaccaacatcctaaaacccttttgatcaaaacatggcttccatttccagaatcttaccaacagatggcagattaagtcaatgcagaatcaacacctcgtgggttccttctacaaccagaactcaaactcacttaggtatctatcctttatacttctctggtttcagatttctaagagtcaatttgctgaatcatatatttttcttcagattttcccaagttagtttctgttagtaactctgggataagtttgaggattcagaatagtaaacctattagccctgtctttgctcttgaagcaacttcctccaggtattgtaatttggtgaatgtgtaaacaagtttaaggatttgggtttattaaaaattgtaatttttacaggagggttgtttgcaaagctgctgctggtgtgtcaggtgacttacctgagagtactcctaaggaacttagtcagtatgagaagattattgagcttttgacaaccctttttccactttgggtacttatgctatacctttctttgatgaagtttgaaactttttgtgagtttgataactgatatggagcaatgtggtttttgtttgttgtgcaggttattttgggaacacttgttggcatcttcaagccatccttggtatgctttttatgcttctttgttattgtttatttactgtagcaatctatgtttttggggcttatagatttaagttttgtaggttacatggttggaaacagatctctttactctaggtcttggatttcttatgctttccatgggtttgactcttacgtttgaagatttcagaagatgtttacgtaatccatggacggtgagagccaatgaacactggtgtgttttttctatctgttagatacagtacctgtttaacgtttagagtctttctcctgcaggtgggtgttggttttcttgctcaatatatgatcaagccaattctaggttttctcattgcaatggtatgtttccactaatgtctatcacatttacttctatttgcttctctgaaatggatgcttatgcaatattctattttgtttaagatattggttctcttcgtccgtttttacttctatgggctgtatacgctttagccaaatcaaatgttgattggaatattctttctttgattaacttagatccaagagtcgttgcatgtccaaacatcactttttcttgaaacgtttgaatcaaatatttgctttctagttactgtagaaacaattcctggcatactcacttactccttgagggatttctcttgtagagaggattgatatggacatatgctatgtgcatttggaaacactacatttggttaacattaattgttgagcagccaactaatacaaactttttctgtgtgttttattttagactcttaagctttcggcacctcttgcgactggccttatcctagtctcatgctgccctggaggacaggcgtcaaacgttgctacttacatttccaaggggaatgtagcgctctctgtactcatgacaacgtaatccttctattttcacttctttctcttttcgttctttaattttattggtcagatttcatatacattatctgttctttaatttattaggtgttcaaccattggggctattataatgactcctcttcttactaagcttcttgctggtcagcttgttcccgttgacgctgctgtgagttttctctataactattttgaatcgtttcattcaaaattgcattgataagatacatttctttttatgtatgaaatataagatacatttcacttagctaaaatatgaataatcatggttcagtaaaagttattgaatgatttaaagtagaatgaagcgcaagaactctattagaatatagttgcagccctccacaacgaaagcttatggatccatttttttacgtcagggacttgctcttagtacgttccaagtagtgttggttcctaccataattggaggtaagtatggtgctacgtgtttccggaaaaatgaatttgtgcttatatatccttagggactaatgtctttttctgcattgtgtgcagttctggcaaatgagttctttcctaaatttacgtctaagatcataacagtgacgcctctaatcggagtcattctgactactctgctctgtgccagccctgtaagttcatatatccagatatatatattttttttattgaattttgagactggaattggtattgattactaccttatctcttctgaaaagattggacaagttgcagatgttttgaaaacccaaggagctcaacttatactcccggtggcactccttcatgctgcagcctttgctattggctattggatttcaaagttttctttcggcgagtccacttcgcgtaccatttctatagaatgtggaatgcaagtaagttactttctcctataccgtagatatacattgccgtttgctttactaaggcttctttttgaaaatctgtgtactttgcaaaccgcagagttcagcgctcgggttcttgcttgcacaaaagcatttcacaaaccctctagttgctgttccttctgcagtcagtgttgtctgtatggcggtaagttttcatagccatttcactaaagttcacatgcaaattccttaagtttaattatgttcaatggcattctgcagcttggcgggagcggcctggccgtgttctggagaaacctaccgattccggcagatgacaaggatgacttcaaagagtaaatgaagtaggaaaggcggtttgcatcttctccaaacgatgtgattgttttgttgtaatgttagtaaacattacaaaatttgtgttgaaaaacatgaaacaaaatgtgtttaagagacatagaaacaagggcgtgcatgatgacaactttgtggtcaaccttttttttatttctcaattaatggacaaatcttttttggcacaccttctccaaattttgaatctaagtttcagattgggattagcgttgttcccggaatcctgtctactctcacaatgcactccctcatttccagccatgacttctcttagctcatatacgtcttttgtcagcaatgataagttttgatgtttttagcattaggtggttttggtgaattttcattttaaattagatttgagtgtttccttttctgatgaaaacacaacttccaacaattaacataagtaaacatgtaaagttgattggaatgtggccagttgatctcggtttcaataaggtgaagagtctcattgtattttggtctttacatgattggaatagtactatgcttctggagttctggtctcagtgtataaatggtggtaaaaaatgttttcagtttacagtaaaaaatgtttagctatattttaacatttcttttactgtagaatgtttcccatatagattttctgttttttttttaattagtaatatttttagttttcatatttttttaatatacgtgctaattcatttgttgaaagagccaaagaaatagtaatctagacaattatacattttgacacacgtttaatccgcgttaaaggaacagaagaattgatgatgattgcatttgcaccggagagacaccgaatcaaaaatggcctttagcctttaaccctctcaaacaaagtcgtcacactgtaaaaacaacagcaacaacaacaacacacaaattcacgactctttctctcccaatctcagatcgaaaatttgcttcatttccctctgatcatcatcattcaccaaatttcgtattcaagaacaaatcgatcgcattcatcttctccccgaggtttcttacatacgactaaaattagggtttaagcttcccattttggatccgattgttgcaaaaggaccttctagccccggtggcttttgctataaccaagtcaaagaactgggggcgaatcagtcccacccccgccattatcctggcgtttccgatcattccagggtaggattctgggattttctacgacctcttcttaataatcctcctcgaaacaacacgttacagtttatcgattccgttggatctgatcggactatggattccgtctctagaggtgccgttgcttcaacaaccggcggtgctgtggaagagccggagtatctagctaggtatcttgttgttaaacattcatggagaggtcgttataagaggatcctttgtatttcgagcggcggaattgttacgcttgatcctaatactcttgctgttactaattcttatgatactggaagtaattttgatggtgcttcacctctggttggaagagatgagaacacggagagtgttggtggtgagtttactgtcaatgttagaacggatgggaaagggaaatttaaggctatgaagttctcttctaggtgcagagcgagtattttgaccgagttgtatcggcttagatggaatcaaattagacctgtggctgagtttcaggtgctacatcttaggagacggaacgcagaatgggttccttatgtaagtagttttcttacagtggctccatcttcaatcttttatgcatggtttctctgatagtatgatactgttgctttggttttgaggtcaagtcggactaggcttttagctgctcaacatatttgaagtttctgatctttagatagttttagccagagtctggtattaggcattaagctgatgttagtatttttcgatgtttgatgtgctcttaaatttttgtaatcatgaactaagcagggggagttctttttgtttcgcatgagtagccttattcttattttctatgggattgattttaatttttttcaatttttgttattgcaagaagcaagagtcatttgaaagttgcgactggtagtagaaattatttgaggtgcttttactaactgtttcgaattagattttggtatgaagtgactttttcttttttctttttttcttttgcagaaattgaagatcacctttgtcggtctggagcttgtcgactcaaaatctggtaattcacgctggattttggatttcagagacatgggttccccagcaatcattcttctctctgatgcataccggacaaaatctgcggactctgctgggtttgttctgtgtcccatgtatgggagaaagtcaaaagcttttagagctgcacccgggacaacaaattcctccattgtcgcaagtttggtataaatgatatgcttgcacattagttgagaagttggtgctaacttattgttaatcttgatgattgcaaatatcatttgcaggctaagactgcaaagtccatggttggggtattcttgtcagtcgatgattcacaattgctgacagtatcagagtatatgacacgaaggggtacttatatttgtgtcttgtctagatcacttttttatttatgatttctttatattatttttgatgccaattattgactatgcagctaaagaagcagttggagctgaagaaactcctaatgggtggtggtctgttactagattaagatctgctgctcatggaactctgaacatgcctggactaagcttagcaattggccccaaaggaggacttggtgagcatggggatgctgtagcccttcagcttattcttactaaggcctcccttgttgagagacgaatagataactatgaagtaagttggcaacacggttttagacacaatttctatctatattactactttatgctgcgttcctattctttgttctaatgtttttgtttctggttttattagagttttaatgtaaaaagtttcccatgatatagctgtgccttaagttgaacacaagtcaaataagttacaatgtttgggatgataaagtaaagactgaaaatgagtaggacgtagctttaactttctacttgtccagtttggttttgttttgtcaaatactgagaatactgcttagatgtgtgcaggttgttatcgttcgtcctctatcttcagtaagttcacttgtccggttcgctgaggaaccccaaatgtttgctatcgaattcagtgatggatgtccagttcttgtaagttttttctgcttcatgttatatactaataatcatgataattagctaacctctgtgacacttactctaggtctacgcgagcatatcccgagacaacctacttgcagctattctcgatactttgcaaacagaagtatgtatactcgtcatttttagaatgtgatatgtttgtcctaaacattttcatatattaatgctatgctaaatccgtttgagataggaatgctaatatatggggggacatttgatgcagggacactgcccgataccagtattaccaaggcttactatgcctggtcatcgcattgatccaccttgtggaagggttagtttgatctctggaccacaacatcttgttgctgatttggaaacttgctccctacatctgaaacatttagctgctgctgcaaaagatgcagttgccgaaggtggttctgttcctggttgtagggctagattatggcgcagaataagggagttcaatgcttgtatcccgtatacaggtgtgcccgctaatagtgaagtccctgaggtgactttgatggcattaattacaatgctaccatcaactccaaatctccctgtagacgcccctcctttgccacctccttcacccaaagcagcagcaactgtcattggctttgttacatgtttgcgtaggttattgtcatccaggagtgcagcatcccatataatgtcattccctgctgctgttaacaggataatgggtttacttaggaacggttctgaaggtgtagctgctgaagctgcggggcttattgcgtccctcataggcggttggtcagcagatctgagcactgcaccagattccagaggagaaaaacatgcaactatcatgcataccaagtctgttttgtttgctcaacagggttatgttactattctggtcaatcgattgaaacccatgtcagtctcacctctgttttccatggcgattgttgaagtctttgaggctatggtttgtgatccacacggagagactacccaatacactgtttttgtagaattgttacgacagatagctgccctacgacgtcgtttatttgcactctttgcacatcctgcagagagtgttagggaaaccattgctgttatcatgcgtacaatagctgaagaagatgcaattgctgcagagtcaatgcgtgatgctgctttgcgcgatggtgctttgttgagacatttattgaatgcattttcccttcctgccagtgagcggcgcgaggtaagtaggcagcttgtggcactctgggcagattcttaccaaccagctttggatctactgtctcgagttctgcctcctgggcttgttgcatatttgcatacacgtcccgatgatgttgtcgatgatacagatcaagaaggttcttcaacaaataggcggcagaaaagattacttcagcagagaagaggtcgcatagctaagggaatgggtgctcaagatattcctcttccccctggtaataatgttgaggctggcgatgcagcaaaacatatgagtgcaaatgctagtgtacccgataactttcaaaggcgggcagcagattcttcctctgaagcttccaatcctcaggcttctgcttttccaggtgttgacagtactattgcaggggtttcacaaaatggctatccagcatttgcttcagtcaccacaaatgcaaatgggcatgagcaacctgagactaatgcatccgatgtggttggttctgacccaaacttgtatggcatccagaattcagtgcttccagcacctgctcaagttattgtagaaagtacagctgtaggatccggaaagctacttctaaattggcgtgagttttggcgagcctttggccttgatcataatcgtgcagatctcatctggaatgagcgtacaaggcaagaattaatagaagctttgaaggctgaagtccacaacctagatgtcgagaaagagcgcacagaagatatttcccctggtgatgtcgaggccacaactggccaggagattatcccacgtatatcttggaactattctgaattctctgtcagttatcgtagcttatcaaaagaagtttgtgtgggccagtattacctacgcttattgcttgaaagtggcaacgctggcaaggcacaagatttccctctccgtgatccagttgcttttttcagggcactctatcatcgtttccagtgtgatgctgatatggggcttactattgatggtgctgttccagatgaattgggttcatcaggcgactggtgtgatatgagtaggcttgatggttttggtggagggggaggagcttctgttagggagctttgtgcaagagcaatggcgattgtctatgagcaacactacaacacaataggtccttttgaaggcactgcacatattacagcactgattgataggacgaatgatagagctttgaggcatcgcctactacttctcctaaaggtatcatttactattcaaaatattgctttcttgttctttttattctagttattcttgttcctccacttattctcagtaaattttgatgtatgcattacgtcgtcacatacaaaatcattttggagatattcttttcatgcttggttgcttactttttcctggtacatgcaggccctagttaaggtcttgttaaacgtcgaaggttgtgttgtggttggtggttgtgtcctagctgtagatctgctgactgttgttcatgaaaactcggagaggactcctattccattacagtccaatttaattgctgctactgcatttatggaaccacctaaggaatggatgtacatagacaaaggtggtgcagaagtgggacctgtagagaaggacgtcatcagaagtttatggtccaaaaaggatattgactggacgacaaagtgtcgggctttaggaatgtcagactggaagaaattgcgtgatatccgtgaacttagatgggcagtagctgttcgagttccagtcctcacacctagtcaggttaagctttatggtttattttatgtgtgtgactggctatggaaatttcattttatcatgcttaactttccagaagacatatgcttttcatgtccattacctttttcctctgttttattcttacatttttatgcaatactcattctaattgataaaatactacgcaggtaggggatgctgcattgtccatattacatagcatggtttcggcacattcagatttggatgacgctggagagattgtaactccaacaccaagagtaaaacgtatcttgtctagtacacgttgtcttcctcacattgctcaggtaatctctttctttctctccgtaattcttcttctagctgcatccatgatgtgtttggtaagtgttattaagctgagccaaggatcctagcttccctactatttaatggcattaggcacgcctgctgtctaagtgctagctttgagtattatctgagagatgagttgtaaaataatcaaagcgctagttttgagtattatctgagagatgagttgcaaaataatcaatcagtatttgaaatcttctcatttagttttccttcatcgaaaaactgggagttgtagtcttgagctgttttttttccttgaccgaaaacagtttattataaccctatgttaatctgatgtctttctataattttgaaaaggctttgctatctggcgaaccagttattgtggaggctggtgctgctctcttgaaagacgttgttaccagaaactctaaggcaatgatccgactgtacagtacaggggccttttactttgcccttgcttaccctggatctaatctttactcaatcgcacaactcttctcggtcacccatgtccatcaagctttccatggtggggaagaagctactgtttcctcctctctgcccctggctaaacgaagcgtattgggtggtcttctcccagagtccttactatatgtattagagcgcagtggaccagctgcgtttgcagctggcatggtttctgattccgatacgccggagattatatggacacataaaatgcgagcagaaaatcttatatgtcaggtatttacatattcgctactgagggctttaggtcattttcttgaatgctatctgtaaactatcactttcaattcttcagttttaatttctcgtttttatttcctcaggttttgcagcatcttggtgattatcctcagaaattgtcacagcactgccattctctctatgattatgctcccatgccacctgttacgtatccagaacttagagatgagatgtggtgtcaccgttattatctcagaaatttatgtgatgagattcaatttcctaattggccgattgttgaacatgttgagttcttacaatcattacttgtgatgtggcgtgaagagttgactaggaaacccatggatctttctgaaggagaagcttgcaaaattctagaaatatccctgaacaatgtatcaagtgatgacctaaaccggactgcttcagttgagttgaatgaggaaatatctaatatatccaaacaaattcaaaaccttgatgaagagaaactaaagcgccagtataggaagcttgcaatgaggtaccatcctgacaagaatccagaaggaagagaaaagttcctggctgttcaaaaagcttatgaatgcctacaggtacgtctacaaagttttgatcattatctgggatttgatgtttttttcaattatatgtttaccatctttgtgtgttattgtatcggtcttttagaacattggaccattggatggtcacgtaatatgttgaaaagtgcaatattcttggataccagcacaccaggacaccagcagttatttcatgttcaagttatttgataaatgctttatgtagaaattgaattccccttcattatgttgctgtgttcttattagtagagataacattggtcaactttttcctttttccatatgtttgcttgtcaaacaagtgtttaatcatagtatgtacatgatgttatcatttagttctgctaagaacatagtcgatttgtatctaagaattttatagtatactcctatctctgaagctattccactgtagattagtgttttaggtccatatatatgattgtgtttatatatacttctgtctctagatttcatatttatcatactatacatattcgctcttctgcttataggcaacaatgcaaggattgcaaggtcctcagccgtggaggttgctgcttttactgaaagcgcagtgcatcttatatcgccgttatggacatgtgttacgaccgttcaaatatgctggctatccgatgttacttgatgcagttacagtggacaaggatgacaacaactttctatctaatgatagatcccctcttcttgttgcagcatctgagcttgtttcgttaacgtacttatttctcttgctaaaactgtacaattctagttttatttatttctagtccttcaatgttatctattttactttcctgttatcttctgtgtagctgtgctgcctcgtcattgaatggtgaagaattagtgagagatggtggtgtgcagcttctatcaactcttctttcccgctgcatgtgtgtggttcagccaacaacttcacaacacgaaccagctgcgatcattgtcacaaatgtaatgcgtacactttcggtaataagtcagtttgagagtgcgagggctggatttctagagttacccagtctgattgaagacattgtgcactgtacggaattagaacgtgtgcctgcagccgttgatgctgctctccagtccattgccaaggtttctgtcttccccgaacttcagcatggtctgctaaaggctggtgccttatggtgagctatattcttattctctttgtcgctgttaatatgtgtttgttcaattacaagacagaatcttggtggctctgttgtccatgcataaaattccatgtataatgtctatctatataatcattatgaaggcatggcgatccaatattcagcagcacagttttccacctggactttgtatctttgttacactcatttggacctttgcttgtgacaagtatgactaatggctgtgcttctttctatttgtatgtctgtttaatcaggtatattctcccattattactacagtatgactcaactgctgaggaatctaattctgtcgagtctcatggggttggagttagcattcaaattgccaagaatgagcatgccttacaagcatcacaagccctatcaaggcttactgggctgtgtgcagatgagagtttgacaccttacaatgctactgcggctgatgttctcaaagcattactgacgccaaaacttgctagtttgttgaaagatgaagttgccaaggatttgttatccaaactgaacacaaatttggagacaccagaggtaaacaatatcttttactgatttgtttgtctgagcagcttacgaatattgaaatgaatgactggtgcataaacatcttcagaattcacatctccacgtatgtttggtcttgtgtttttgtatttctcataagaaagatatgtttgatgtcattatattgcagaatttctatttcttaagatacttcttctcatgcgcatacagaatcttgatgaacacttcattgagtgttaaaatcatgttgagcttttggtgcatagactgtaattgtatcaaatttttgattcacagattatctggaactctgcaactcgatcagagcttttaaattttgtggatgaacaacgcgcctgccagtgccctgatggttcatatgatctgaaaaatgctcaatctttttcgtatgacgcactgtcaaaagaggtctttgttggcaatgtttacttgaaggtctataatgatcaacccgactcagagatcagtgaaccagaatcattctgcaatgccctaatcgactttatatcatcattagtgcatactgagttgccctctgtttccgaggaccaaaatttgatcgaagacagaaactcatctaatgatactccagagcttcaaagtagcgtcgcagaaccgtcgttgattgaagaacattccgatcatcagccatcatctgaggggatgaagaacgaagaatgttttctgattgatcacctccaattaggattgactgctcttcaggtaattatctggcgcatgtgaatgtgtagatatcaaataatagcatgcctaaccttttctttgcgttttttgtagaacttgcttacaaagtatccagatctggcttcagtgttttcgtctaaggagagattgttacctctctttgaatgtttttctgtggccattgcatcaaaaacagatattccaaaactctgcctcaatgtcctctctcggttaacagcttatgctccttgcttggagacgatggtatctgatggatctagtcttcttctcctcttacaaatgcttcattctgcaccttcttttcgcgagggtgctctccatgttctttatgctttggcaagcacaccagaacttgcttgggctgctgcaaaacatggtggagtagtatacattctggaacttttattgcctttgcaaagtaatcattctcaactctttttcttctcccattggctttctgattacataaagtggaatcaatgacacaaaatggtcttgtgcagaagaaattcccttgcagcaaagagctgcagcggcttctttgttggggaagctcgtcgcacaaccaatgcatgggcctagagttgctatcacacttgtgagattccttcctgacggtcttgtatctataattcgtgatggacctggggaggctgttgtccatgcacttgagcggaccactgagactccagaacttgtgtggacaccagcaatggcagcatctttatccgcacagattgcaaccatggcatcagatatttatcgtgaacaacagaagggttctgttattgaatgggatgtaccagagcagtcagctggtcaacaagaaatgagagacgagccacaggttattttatttatttaaccctatatatgaatcagagcagcagggaaagagttcctttaagtggaagcataattattgatgaaatttttctctctaggttggtggaatctatgtcaggcgtttcttaaaagatccaaaatttcctctgagaaatccaaaacgattcttggaaggactgctggatcagtatttgtcagcaatggccgcaacacattacgaacaacatcctgttgaccctgagctccctctccttctctctgctgcattggtttctttgttgcgtgtgcatcctgcacttgcagatcacattggacatcttgggtatgtcccaaaacttgtcgctgctgtggcatatgaggggaggcgggaaacaatgtcttctggcgaagtgaaggctgaagaaattggctctgatggagtgaatgagtctactgatccctcaagtctacctgggcaaacccctcaagaacgtgtgcgccttagttgtttacgtgtgcttcatcaacttgcagctagtaccacatgtgctgaagcaatggctgcaactagtgctggaaatgcacaggttctctactctatttctctcctcctactctaccacacgctgttaaaaatggaaactagttgttggtgttacctatgacatgtataatgactcttaagttgattaaacaccaggtggttccacttctcatgaaagcaataggatggcttggtggaagcattttagcactcgagacacttaagcgtgttgttgttgctggaaatcgggccagagatgcgcttgttgcgcagggtctaaagtgagtaatcatgttactatatgataatgtctttggtactcaagctgacgggtgctcacatcttaattatctctaactgcaaaactctgttaagactgctgaagtgttaatctgacagtacctagttacagaataaaattgtggaaaatagtcgtttagaagaagtggatttgggtgagatatatctaattgtctgatacaaatgattgtgaaaattggtagggttggtctcattgaggttcttcttgggctgcttgactggaggacggggggtaggtatgggctcagttctcacatgaaatggaatgaatcggaagcatcaatcgggcgggtacttgcagttgaggttagtgttgaatttgttagcgagatgtttgttatgtgtgttacacatgtgaatgatgaaataattaatatatgtctcaggtattgcatggttttgcaacagaaggagcacattgctcaaaagtgcgtgagatacttgacgcgtcagaagtaagttgtgatattgaaacactaggaataaagtcttgttcaacatagtagttctctgttgttaaaaaaactcatatgaatctgtcacaggtgtggagtgcatataaagaccaaaagcatgacttgttcctgccatcaaacacacaatcagcggcaggggtggctggctttattgagaactcatccaacagtctcacttacgctcttaccgctcctcctccgccttcgcatccttgaccatttcttccttgtatatccttttgtaaagtccaatcattaccgtgcttttttttttctttctatagagaaatactgtcgtttgtaaatgtttgatgagaaagtagaaaatatttgtggtttccttggaccaacaatgaaaactacggtctgatgacaggatttgtagttgttgggtcgtagacgatatccaaacaacttgtccctttatattttgggattaaacttgttgcttattaagtcaattttctccattatctaaaataatctgctcactccgtaacttcttcagctgaattacttatttgaacaactcactccgttggtaataacgtaaaatccgaatcttattccaactaattaagaaagaatacgtaatcttttttaacaatataccaaacagaaagaatgacttctacaagtgtagttgtatttatgcactcgatgtactaaaatcttttctctattaacagactaactgtattatcttatccacttgaacagtttctcgtcagttgccagctcagcttgaagctcctttcttcttccttcctacataaactttcatgcaaatcccatcgatattgagatgggtaaatgactaatctgaaaatcatttacttagaagttataaccttaaaacatgttgttttccacaaacggaacacctaatcgtctacttgtaatagctcaatgccagctccatcgactattttggaaccgtttgatgctgcaaatgattttatgtactatgttcccaacttgtttttagatatgttttttagaattgctcatccatgacatgactacactttcctttctgcatagaatcacggtgaacggctcaattgtacatcgttagagatcttttgtacacttgctttcattaatctacaattttgttaataaattgcaatgtctagaactcaaaccgcatgccttgaatagaagcatgaattaaccctacatcaatcattggtctaatggggcttccactagaaacaattttttcatttcattttggtttggatatatattttcaatttggtttagatagaaaagattcggtttatcttaagcacctccaagaaacagtctacaccttttaagaaatagtaattaatttacatctttaagaatgattcatattgtctctttcttttgactagaattggtgcccaaaatcttatccatttatttcaactctatataaatgatttccattttccagcattgttctttcatcacgtatgacatacccagcaacaattttaattttaaaagagagagattaaaatcaaaaagatgacaagaaagaaggtgaaacttgcatggatagagaatgacaacacaagagcaataagtttaaggaaaaggagggtagggttagttaaaaaagtgagggagctatccatattgtgtgatataaaggcttgtacaatcgttttcagtcctaatgaagctgagctaatggtctggccatcagttgagaggctcgtggccttctagatgatttctttgctttaccgaggtatgagcatattaagaaagagatggatattgaattatttctaaatgagaagacaaataaggttaatgaaaagttgataaagagttgtaagaagaataaagagtatgtcagtaatgagttgatgatgcaactacaacgcggtcgtagaatccatgatcttaacttaagtgagatctatacattactatcttactcaagggaaactatcatgtcttttaggaagaagtttgatttcatgcagcattctcctcttcgtgatccaccggtgcttccattcgaggtgcaagtcgaacagtttaagagcaccactaaggacgcttttttagggggtgatctagacgttgagagagctaggaacacaaatgaagcaacaagaataattaacattgatagtttaagggagaataaaagttattacttaatagatcaatggtttccaacacctgaaccgcctaaacctgtaacataccagcaaattgggtatgaaacttcaaaccgtagaggctacaatccataccaaggaagtagtagcaatgggaaccctaatttcgagatgatgtcagtttccccgaagtgatgactttccagggttcggttggatctacctctcaaccattacaacatcaaaacatgaataagaatccaatagtggctatgaatcaaccaagccaatacccttttgatttatgtaaacatttttagatggaaaaggaatttactccttttgttatttttaaaatatttattttcttcgttgcttttcagtaaatttctagataagttttaatttgcttgttaagagtttaatatatctttctttgttgtgattaatattgaagctaagtgctttgctttcagtagtaagaaaaagtttaaaagacatttccatgtatttgtgctaatcttttttaccttcatatataacccaaagatatgtttgacatcttttttaccacagtcatttattaatacaattttcacttgtcaatttatcagtagtatattatttgcttgttaaagggcttgtaattacttatcattattatatgctatctatgtatttggtaatcaatatttatgaatttttgaatatatggaggcctaatttacaccatctgctttagaattttcttttagctaatacataaaaaatgtgagattgtctttttaattttgttccttttgaattgtttctttggggaataaaaaattgtttaaaattcgtttccatttacttgtgtcaatctttttttataatatatacacatgcttggagagagatttagaacatgcacacctttgaccaaaaaaaaaagaacatgcacacctagaaaaatacaaacatataagaaaaaaacaaataatagaaaaagaagcctataaagttatccactcatttatcatctccaccatcaaaatctaccattcccccaaaacaaaatgtctattaaagcatttgctttgattcaactactatccgtcacgattttatacaaccatgttcatgcaacaagtccgatcaaaaccatcgtagttgtggtgatggaaaatagatctttcgatcacatgcttggatggatgaagaaactaaacccggagatcaacggtgtggacgggtcggagtcaaacccggtctcggtgtcggacccttcctctagaaaaataaaattcgggtcaggttcgcattacgtagatccggaccctggtcattcgtttcaagcgataagagagcaagtattcgggtcaaatgatacatcaatggatcctccaccgatgaacgggtttgttcaacaagcatattccgaggaccctagtggtaacatgtcggcaagtgttatgaatggatttgaacctgataaggttcctgtctacaagtctcttgtctccgagttcgctgttttcgataggtaataataatatactttcactgtctttttggaattagtattacgtcatataatcttgttgtcgtttcctttgtcgtcttgttggctcatctttaaacagttttttttttttttttgggtgcaaatgctcatcttacaacaacactaaattagtatgttacgtaatatttttcgttaaaatatattactaaaactattgatttaaatatgttccacttcagttatattctcctttacactttttttcccgtcgatatttctccattttttaatatcttatattttttcctctctatatggaagatttatcgatatctattattttgttaaatggtttatggaagtattattattattacgtatataatttttttttggtttttgttaagtactaataatatagtcttactggcgctctctttgtggtagtgtgtactggagtttgaccgttcgctcatgttttttttttgaagaacgaacgttggttcatgtattttttttattggggggcgaactaccgttagtacatattaaattcattagtacactaatttgatattaaaatgaaataaatctgatattttttatatataaataacagatggtttgcatcggttccatcatcgacacagccaaacagaatgtttgtacactcagggacgtcagcgggagccaccagcaacaaccctatctcccttgcaaagggttatcctcaaagaaccattttcgacaatcttgacgacgaagaattctctttcggtatatactaccagaatattccggcagtattgttttatcaaagcctaaggaaactcaaatacgtttttaagttccatagctatgggaactcttttaaggatcatgcaaagcaaggcaagctccctgcctacactgtcattgagcaacgttacatggacaccctcttggaaccggcttctgatgatcatccatcacatgatgtctaccaaggacaggtttgttttttatttagtttatagttactttgaaacatattattacataaagttttacttaaaacttgcatgttatgttattacacatttcagaagtttataaaggaagtgtacgagaccctaagggcgagcccacaatggaacgaaactttattgattatcacttacgacgagcatggtgggtatttcgatcacgtgcccacaccggttcgcaatgttcctagtccggatggtatagttggaccggatccattcctatttcagtttaacaggttaggtattcgtgtaccaacaatagcagtgtccccatggatagagaaaggaacggtcgtacatggaccaaacgggtctccatttccatcgtcagagtacgagcactcttcaatccccgcgactgtgaagaaactattcaatctatcatcgcctttcctcacaaagagagatgaatgggctggcacttttgagaacatcttacaaatccgaaaggagcctcgaactgattgccccgagacactacctgaaccggttaagataagaatgggagaggcaaatgagaaagctcttttgactgagtttcagcaagagcttgtacaactagctgcggttctaaaaggtgataatatgctcacaacatttcctaaagaaataagcaaaggaatgacagtgattgaagggaagaggtacatggaagatgctatgaaacgattcttagaggctggtcgtatggctctttccatgggagcgaataaagaagagcttgtccatatgaaaacttccctcaccggaagaagaccttaagcttcacttcccattaatcttccttttaacttgtatcacatatctctctttggccatttacttataagtcaaatgctcgataacttataaataaatggattgttaatttgctaaatagatataaataaaatagaaggattgttttataagttatgtggcaaagtaacacttttcttaaaactgggtgcacgaaaaaaaaaaaaagggtattgtttctctaataaagacagtggttgtaagataggagttttttagtaggattgaaaaattacgtaaattttaagtggcctattttaaaaataataattaggtttaacctataatgggcctattattttattatattatatatatatatatatatatatatatatatatctgatgaggtccaataatattttttgatggaggtcaaatttccaaaattaacaaaccttacatattgcctctacccctgtctgttacccatgaatgatccaatataaaaagtagagaccattgctaaatgcaagtggtgtcaaggactgtacttattgtagtgtcgtagtgatctcgaacatcgtattcgagactctttcatcactggagcaccacaagaatgtggccatatctagttctagaatatacgattttggttttggtggctacagaggagaaatataaccgtgtcttccaatcttttttaatcttgttgaaagttatctcatcttagctttcaagaaattgtgatgtttatgttccatattgtctttctacatctatgaacttgacttctcgccatctgataggaaactctaaacatactctccattgtattctgaaactttttatctgtaacttgaatttccgtaccacttatgtaatgaaggaaaaaaaaactctttgattttgaatctaatgattattctactaattattcattgttctatggctatagagtgcaattttccttcctttttaatgcagtcaactataataaccgtaagttttcatttccatgctcgaattggtaaaaaaaaaaaagaatataaaataggtccatatggagaattcaaacatatcaaaatctaaaaaatatttgaacataaagtatgacatatataaaaaaaaacaccttacaaattgagaccaaatatggaagttaacaaaactttgactaatattaattgaaaaacaatgtagtcatcatggtctgaaaattataaatactgaggttttcataagaattcattcatagacataaagaagaaacatttaaagtagaaaaatggcaaaagtaattagcatgacgtttataattatgatactagcggtaatagtgatagaaggcgacgcaaaatcagagatagaatgcagtaagatttgtcgagagcactgtaaacgctcatcaccagcatctgaatgtgcggcttgtcgtaaaaaatgctacgaatctccaccagttgcagtgagagccaggaatcccatcatggagttagaagagcaaaaatatcatttgttttagttaaatataatatatatggtgatttatagatggagaggtcaatacattttaatatttctatgcaactgattaataataagatgataaattacatgtttatctctccatgctcaaattagtgatttctttttttaaagtacaaacaaatagcatatatagtagaagtgtgaatgaaactggttgaatcttggtaatattattatttttacttcgattggaaaattatttttcatgcaattatgaaagtgtttaatcagtaaaaatccgttgcataatgctagaaaaacaaaggcaaaagtgcagaacatgtgttttggcttaaaaaatacatatgccatttggaaatgaatgggaagcacgtatttgctgcatttgttctctagcaagaattagaccatttggttttcgatgatgcatatagctttcgcaacaaagacagaccgagctcaaatttctagcggacccataacttaattagacccaatattgcaacataatttttttgaaaataaaatatttgggtttttttttactaaagaaaaaacccaaaaggtctgatggacgctttgctttggcactctcagcacatgcacatgatcgggcctgattaaaggcggatcaagtaattttattcaccaatcacacatattgtatatgaaagtgtagtttaggtttagaaattaatttagatagaacctgctggtgcggttcaaaatgtgattaaaaatatgtggttagatgcagaacttttgatttttattcttttattccaaagtaaatctgaaacaattttgaattttattcttttattccaaagtaaatctgaaacaatatatacaaattaatttacacattttcattcaataacaattggtttgatcactctaaacatttttaaaaattagttaatattggatttgattataccaaactatatttatgataattaccattcaaacattctcatgtaccgtttgttacacattaaacatacgttttcatatgataaatttttctccaacgaactacaattgaaccatattacactagtcaattcgcttatcccacactgtttgatccgttgtagccattcacattttttcttctatcgatatcaactttttcttctttttttctctactccatttttttttctcatcacctttatgtcaatcttgttcaaaaacgaacaagcaaattattttgcaggaaaataagtttccactaataagtggaggaaagaaatatcaaaatgaatgccaaaagcattggaaagaaaaatatgcaaataaccaaggaaaagcctcccaaaacctttaaaaaacaagcctcagaagacaaacccttcttccatatccacctttactccgttaacatttgatacaaggtcaagtgaaagggtaaggctaaaaatttgcaatagtaaaggcaatcatcactttagagatgagaaagaaaggtttaaaaaagagtctccatctccttgagaagatcctcactctttaggtacatgaaaaacttacattcttcaatccttcgatcattgagacaaataaaatatttgcaaaaaaattgtcaatttatatatatatatatatatatatatatatatatatatatatatatatatatatgaatacaagaaaaacaaaacgtgattgggctaaaaatctatcaaaggcctaataattggctactggaggcccataaaagagtatccacatcaaatacactctagtcattggcaaaacttctctagtagcttccgattaccagagcgaaaatccagcctccactgaaagaaacttctcaggtatttttctagggtttttcagttttcaacattccagcttttttctaggttttttattttggctcgttactctgttttggtttctttcgctttcagacaaatccttattagttcttctctgtttacttgtttgttaatgttttatttcagggtctgacaaaattaaatgataaaatcgaagttcagtttacaacaattgggtttttgttaaagatatggacagaatcagtgggttacctgatgaactactagtggagatattacactgtcttccgacaaaagaagttgtatcaactagcattttgtctaaacgatgggagttcctttggttgtgggtacctaaactcacgttcgtgatgaatcactacgaatcagatcttcctattcaggattttatcaccaagaatctgcgattacttaaacctcaggttatagaaagctttcatctccaatgttttagttcatcatttaaacctgaggatattaagcattgggttgttactactatctctcgccgcgtgcgtgagctgattatcaactattgtgatttgtcttggcttgacaaacctgttgtgttattagatttaccaaacagcttgtatacttgcacatcgctcgtcactttgaaacttataggccattccattattgttgatgttcctcgaacggtttctcttccttgtttgaaaactttggagcttgattctgtggcatactctaacgaagaatctcttcgactacttctatcgtattgtcctgttcttgaagatttgactattcatcgagatatgcatgacaatgtcaaaactcttgtgattattgttccgtctttgcttagactaaacttaccgatagacggggcttattcgtgtgatggttatgtgatagttactcctgctttgaagtatttaaaagttcctggcctttatagagaagatttctcgtacttgcttacgcatatgcctaacgtggaagaagcagatcttagtgttgagcaagatgttgagaggctttttgaatcaatcacatctgttaaacgcctttcgttattcgtattactcgacattgaagacgaggtatacttcttataactatcacttacaacggctaaattgttttttcttttcttgagactgaatcataattttttttggttatgtttttgtgtgcagtctatgtatcataatggtatttacttcaatcagcttgaacatctgaacctacatatataccgcgataactggtccaaattacttgttcggttgctcgaagattctcctaaactacgagtcctcaagattgttgtcgatgtaagtttcttcattggcaatctaaaggcactagtcttattaattatctcttttctcacaaaaatttaatctcagggtgaaccatcctttgatgaggagtttgaacatgttagctggatatataatgatgagagctctgttcctaaatgtttgttggatagtcttgaagttttcgagtttgctggatacactagaagaccagaagagagagatttcgtgagttttatcttgaagcatgcttgtcatttgaagtcatcatcaatatcgcgcttatcatgttatgttctagaatagaaacttcgaaatcgatttgttgtaccgatctctggattttaggcttttttttgttgtccaagaacgaagtaggtgtttttctttatctaactgtaatgtggaacttgctttccaatgatcatctctctttgatgactccatatttccttaatcaaccttgaagttttttgttgaactttctttgcgttatcaagtaaaagtagtatgtaggatttgaagtgtaatcaaataattagttaattttaccgtcttaaaaccttcatttactgttttctcgtcgaatttgtttagccgaaagttctcttgatctctctctagaacaatataatattagttttccaaggcttataattcaatttggtttgctgtttgcattcaccttgtgttagtttcttagcttaagtcacaagccaaccttgtattgattccttttcacgaaggttttaactctctttattgccttcatggcttcatgagatacaaccctttaaacccaagttcagaatttatatcacgtacacttcgtaagtgcttctttcttttttaaccatgaaacgtgaaagctgctgcgatgtgtttgtataagatgtttggaggagcttatgattctctattcctttctctcattttttttatgttgtataagatgtttggaggcggaagaatttatacgagtcttcaaggttagagaaatgagaatggattaattagctaataagagataaatattgaagaacgattttgtgatatatatggaatgaaaatcgaagtgttctctctttgaaattattgacaaaaaaaggtaaataagtaggaacctctcgtcttaattatcctaatgaaagtatttgctattttgcgttagagattagaaaaaatagataattttgtctaaaataaggagttttataagaaaggactagttgattgtttgcataattttgttttgtttcagaattgagacttttgggaggaagaagaaagaaatttgttttctgaagaaggtggaggtgccaagagaattatcttaatccttgttcctcctcctcctcttcttcttcctcattggttgtttatgtttttatatataatctaggttttgttagtccaactctatctttctctctcttgatttcaacaacttggtttcaagttcataaacaagagagagaaagaattgttagtctccatgagtaggttatgttatcccataaccccaattggctatctatttatcacctccatccatttatactcctagaaacaacaaatctaaaggcaacacaacacaaatagtaccttctaaatgcttctatacttgctcatcacttgtctctctttcttcttcttttccaaatctttatcctttcctcaatgggcatctaaaaccaaaaatttgctctccttctacttctccaagtatttgtttacaaacagtctacaccagatcacacccgatctagcctctccggtgctcggaaaaatgtcaattcttgacctccctgaccttccactcgactgcattcttgaacttcttccaccctctgaactatgtaccatggctagggtctgtagctcgttaagagagagatgtgtaagtgatcatttatgggagaaacacttgaagactaaatggggaaaaatccttggaccttctgctcacaaagaatggcaatgctatctatcttctccatatcatctcgattctcctcatcacaaaactagtcatcttggtttggccaaaatcatatctcttatgcgatcgctttcatccatttttcgagatgatgatcataggaggagatatccatcttcaatccctcttgactctaccatgaacttctacctatccctcgaaacaggtcgcttttggtttccagctcaagtttacaaccgtgaggtaatcatagatttcataaacatatatagctactccattttattctttatgggtttgactaaagtagtgagggcttttttggtgtaagagcagaatggacatgtagggttcatgttgtcatgctatgatgctgagctcagctatgacactgacactaatacttttcaagctaggtataaaatatttcatgtccatattcaacacaatattttgcttattcttcatagaatgctataaactatactgtattgaggattttaggtatccaccacatggtaaaagagcaattgcggttgaaaaagacgtgacatgggagaggataagagcagctcccgttgatgcatcaccccataatctctatgtgtcagattctctaaatgagttaaaacccggagaccacatagagatccagtggagaaggaacaaagagtttccttatggtaagtataatctataatgcttgtggtttggacataatatatatgattctaaaacaagcttgtgtaggatggtggtatagtgttgttggacacatggaatcttgtgatggcaatctaaaccattgtcaatgccataatagcggtgagtcctcaactttatatttctgttttggctgtcacattcaacataaaccccctaatcatatggcattagcctttctctattaatgttgtgtcaaaagtatctatgcattcacatgttgtactaaatggtaagtgttgatgtatggtgaaaatagagatgatggtgttggaatttaaccagtacacagtcggatcaaggtggagaaaaacgatgattaacaggagagatcatagagagaaaggtaacgaggaagacgggttctatggaggaattcgaaaaataaattgtaaagaagatattgaaatgtggaagcgtctttggccatcctccatcttggagtaggatgagtaggatgttaatcttagaagtgtttgctcttgtaccaatgtacaattgatctttcattatttattgataaaatagtaaaaatatgcatgaaacttttgtgtcacttgaaaatgaggttgtttgatttgagaagaaatatgggggtggtgttgtatagatatattcaatacaattgatttaaatatatatgtcatcaaagtagattttgttttttgatagtccattctgagaattatttaggtcttaatattgttaaatacattttctataaaatgtaaaacacgctcttgtatgtcaatgtgtattttttttttttttgggtacctgatgttattggatgtatgttgacgggccaaagcccaatttgggatgccttattaatgttaaagcccgtttaaaaaaaatattagataaataaaacattaataaaaaaatagacaaaacacaaaaatgaaactgagagttagttttgctcagtgcttcttcttgtaatggcaacgacagtgtacggccaagcgtcgctgccacagatgcatagtcttttctcaaaggtcaggccttttctctctcactcgccgtctttcacagctccgttcactcgtcggcggagtttcccgtttagtgctcttcctacgacgaaagccatagacgcggcgttaatgaaggagaaatggttggattctctctctctcacctcacaagacgaagatacgactccggagaatgctgagtcaagctgtatcattgggattgaccctgatttgtctggtgcgttggctcttttgaaatttgaccacttgggttcttcttcttttgctcaggtcagtcactactcagtagaatggtgaaagtatggggttttagggtttttgtcaaaagtatctatccttacaaggttatgtgaatcattttgtgtagaaccagacttattaccagagttggttgtgttttgaacatttggttcttatgctcaggtcagttagggttttagggttttgtcaattgatttgttgatgtaattcttagaattttgggttacagaaattatctatctttacaaggttcgtatgtaatttgtgagaagaatcgagaatgtgaaggattctgtgaatcgttcatgttgctttgtttggttcaatttgaagtaggtttatgatatgcaagaactcatgtgaatcatttttgaacaaaatcaaagttattaccaaaattgattgttttttttttttttttttttgtgtggcttggttcaatctggagtaggtttatgatacacctcacattccagttttagttgggaaaagagtaagaaaacgtttggatgcaaagtcaattgtacaattgattcagagcttagatgttccctcaggtaagaaagatctctctttgttgttgtgttctttaggttagatttttagaaataacttaggtcttgtgtattcaacaatgtaggaagcagagtgtatatagaacaatcgaatccgtttcccaaagatggaaaacaggtttatgctacagcacacattcgtttttcttcagctatggtgtgttttattcgttaaaactgaaatttttgtgtttgtgtttgtgtgttagggttggtatagtggaggatttggatatggattatggataggaacacttgttgcttcaggcttttgtgttattccggtttccgcatctttatggaagaggcattttcaacttgctagtggaagttgcacaaaggtgattaattgatctttttactgtcaaacttttgtgagttaaatacaagtctctcaaatgctgacaatgtttatattttccgttacaggacgatagcagacgagttgcagcggagttgtttccatcgcttagttcgcaacttaagaggaaaaaggatcatggtcgagctgaagcactgctcattgcggcgtatggtgaagcccttaaaacagagaaattgttgatccagccaaaggaattactctctcaagttaactacttagaaaaccagttagtggaggttaaatagtgttttagtttcttggctctcaactcattaatcaaacaattacaatttggagtctattcctaactctactaaatgtatttttgctaaaccagttggtaaatctttttttttaccagttagtaaatccttaatcaaacaattacaattccaactattcaagtgaaggaggattataatagactccaaattggcttattcatcctccttaggccttagcaccttgcttgtgggtgatagttaatataaagtgcaactacttccacaaatcaagttcattcatacaaatcatacaaggtttaactaacaacacaaacaaattttacaagaattgataacaacacaacaaaaaaaacaaaaaaagatttaaccattttggccaaccaaaggctacagcgatgctgagaggtgagatgtaacaagtgaaaaagtaagtggcttctgcttcttgtattcattgtaccgcaaaaagaagtaacccaaatattcaaactcaatgggagacatccttgcctgttccaccaaatttgtaccagttacattagcttaatacaagttactaacataaagcaatatactagatggttttaacaagcgcacctggatgatcgcccatattgcccagtacaaatgagatgctaatttatacgcatctgtctctacaaagactgattctacttcagcgatactgacctgtttacaccagcaatttatatatatttcttaagccaaaattgtttcaaaagaacacagacgtaatgtcttgcaacatattactatctccattaaaaacaaattgtattaattccaaacgctgatatgttcttacctcgtctggtttgtctggctgtaagtaatgcttgatgaaatgatattgttcctctttacttgggtacctacaaagaaaccacaatgagcaattatgttttgatctgttgaggaaatttttagagacaacagaagaagtcaaggaagttgaacatacaggctgtaatcacagtcgtatcctgcatattcattgaagtgatttccgatgtcaaagcctctatagttgtatgatccatactcgaaatcaatcaagtatagtttctctgaatatggatgaagagaatcaagtcagaaactagatatcataactacttacgatacagaagaagacaattgttgcccaactcataaagttggttctgggatcttgtatctaaagtgcaaattttcgggtaataaagtgaccctactttttcgtgtctatgtctgtcattatatttctgttctttcagccgagaaagaagtacagagaagaagggattttcttaccttcttcatcattcagcatgaagtttcctgatagtaaatcgttatgagcaaacaccacaggtgcgttaagtaagcctgtgaattcctgatcaatcatcagaatcagcaaatacaatcaaaccaaagcaaagaatagattgctaacatgcacaaccaatcacaaacacaaatactttagattactgaaagaagaattagcagattttggaacaagttactgcataggagaagaaccagaggaccaattcttcgacatcactcaaggatggccacagtttagcacatagcacacaagcaactacaatttccaagatgaaaaaatatagtattcattgtattgtctggtttagcacatagcacaaaaacaactacaattatgtggtaaaccatattcgcacctaggcagaacttgactagtaggattttcaaacaccagaaatggagtatcataagacatcaagaacatatacacagtgcagagatacaaaattctttacagagcagaaggaaatacccttagctcaataatttctttgtggagttcttcaaacgaaatagtctcaaagagcttctgcttatcaggttcttcaaacgtaagagtagatgctgcaagtaaaggtacatagcagacatggaaaaacgcataagagctggaaccactattggtggtttatgatctagccaacacttcatcaaataaggggaaaagaaactagaacaataatcaaaacaaaaataaacttataacctttttcatagaacttcaagatatcaacccacagctgaggttccttggaacctggtatgtccactttatgaaactttccaagttctctggcaatttgtgcagcaatctttggctctctcatgtctgcccacaacaaaggagaaatgaggttcatttgagatgttccaccactgttaatgaggagcattgccaaatcttaaaaacaacttcattcagtttaattccatagcatagaagtattctagacaaggattgaagcttatccatttgtttttttttttgtcttgtggcggcaaactttcatttgaatttattaaccatacgaaatttcaaggaaattcactcccttaacaacaagaagcaatttatgttttctagagacattcccgctactggaatttaaaatacctacctgatggctctaaggttcttgcattgatgaacgattgcaccatgccatttccaaaaccaccaagcaacttggcaccaaatccggcagccgagagatacttgatagcctattgaagacgtggggagcaaataacgaaaaacacaaatgataaaacatcaaatgatgcaaaagaataacactggcagagaaacctttgacatttcaagaaaaaatcgagcaaaactctcccatgttctgacgtaaggctcatgcttcaagttgacatcactagaagaaaaataatttaaataacatagaaactcttggtaacgcaaacaaagacaccaaaaacacggatcagaacacaagggggaagggacttatcatatatataaataaaggaaattaccagaatctctctctcccggttaataacatactcagtgttaggcccatacagtctcactgtaacagacacttctttattagtgtcctctttcacagaaaccttcagcactgccatcatggaaaagatgacataacagttatagaaccaaggtagaaaatatgagcattgacatgtaattactgtaaccttgtaagggaaactcacaaagatttgtaatgcctccagatactctctcaacagagaagagtgaatcatcaagctctccccaattcttgaacagatctttacataactctctgttacaaaaaaaaagagaaattacaaccaaaacaaaggttcaagatagcttttacatatctcttcctagagaaacaagactcatgccacattccattcatttctaactaatccgccatgaaaacgaagcaataacaagaagatgagtcacacaacgaagcagtcttatcatctttttaatgttattttaatctcataagtaacacaacgaagcagtcttaacaagaagataaaggaagctttcactatgtcaccatcaaagcaactttacaacaactactgcctccacaaaaccaatccaagtgtaaagaaaatagcaataaaagccaatttgtaagttctaggtcagagagatcttcttcttcaatcccaatttcaaggaggaaaacaaaatcaaatctccaaaattcacggaacgagctatcaaatgagaagaaaattagataaggaaacgaacatgatacgaggaatcatgagaggaagaggcaaagacgtgtcgacgacgaacgaagaataagggatttgttcggcgtcgttagctgcatcttcggcgttggctaatgcccagatattcttcgctgctcccattttctttcaaactttttctcttcttcttctgcaaatacaaataaagattctctttttttttttttgtaatcagatctcaattaattttgattctgttttttttccctaattcaacgcttccatttatattttatgtcggcattttgatattagggatcagtcgttttaagtttttaatttaacacataccgtacaagtttggaattagggatgtttgaatctatctctcacgatgtattatgagattgtgatgtctgagaaagtcagaaagcaatactgattttaactaaaaaatatttttatcagaacctagaaacaaaaataacagtcattagaaatcgatcccacattctatcaataaaatctttttgacgaaaataaaatatttgacttgtaattttgtttggttataacttataggtgcaaatttctttttatttatttttctctctcaaaccggttcaaatcagaaaaccgaaatggtctgctctaaaaatctaattacttttcgaagttgacggaaccgccgcagttgatcaacaagcgcacctctctaacaaagtaacaaagaggtggtatttgttaatcaatacctttcttcgtcgattcccttagctgatgtgttgttatttccgaatttgatttgttggaacacacttcgaagcttgggatctgaaatatctgattctgactgtatactgtagtcaaagatgggcagtgaaagtgataaaggtagagaagcaattgttgaagaagaagaagaagagatagtctgcttggagtctttcttcatcaacgatgagtaattttgttacacaaacaaatgtttgttttatttggtttttaaacttagatcaagtgtctgcttttggttttctccttatacatgtttgttttgtctttgtcggatgcagttatcagttgacgaagtttacgtttggttctcatgttcttgagctctactgtctccaatcagcttcaagtaagttaatttcacctttatcttgtatcaatcttgcattgtatttttgtttttacattattgttttcaagattttaattgtatttttcaattatattttgaccccgataaaaaattatgggtccgccactgactccaatgcctaaaaccacaagtgacgatttattcgaattgagttgcaatgttgcatatcaaaacttgaattttaagctttttaaatactggaaaacaaatcatgcaaactgaaaataattaatgaaagaattaagtaatcgttaccacgaaatttagatgcgattatttatgtttcacgttattattgaataagtgatcaactgataaacaacgaagcatgcatgcatcagctaagaatgatagaagtcagacatacactatactgaattactgatacatgcattagtttataggacgaattaaaacacctttgacaatgagccctcccctgttatcgccggagtcgacctcagacatgcggaacccaatcagtccgacattctccggtgtcgtaatgaattcaccggcgtgtatagttacccatcctttcccaatatgctgcctcatgtcaacagctcgctcttgcgttcctggacctcctggcctactgttgatgtaaaacaggttcattttcaccgctgcattccatttaaaagctgagtcttttaaattaacaacgaacagaacctcgtaatgtgtccatggtgccatttccgtcgtgtccaaacttccacttacgtcaaaccaataaactcctagaagctcagcaacttcgacgaatgtattgctggtaaaatcaacaagtcttatttaagtgagggttaactacatggctttttgagacatacatgattcggccataagccaacttaactcttttctatgaagttatttgtttttaaaagttatatttgatcatgtatttgtaaattgaagcatttctttctgcctaaagggatgatgaaagcatatcatgtgttcgtttgattcagatttttcggtacggtttggtttggatcggttaaacaagatcagacaataacacggtcccaccacttgtcccattataactgtttgtaggaaatatatataaatccttaccttgatatgttgtgatccagatttacccatttccaatgctcttcgctatgagaccattcgatgttaagatcccttgcgcagatcatgcgattctgtccataaataaccgacctcagtccacgaaacatgatacatatatatatatatatgaccaaaaaaaatcaaacacaaagtaggaggcatatttgatcgaatctgatgaccacaaccttcttaagctcattcgtttgatgttccttgagccttttctcctcttcctagcaaacgaaggatttctaacatttaaaatcattgtctaaaggcaaaacgtacaagagatcaatttctatttgaatgcaattaagtacaagtatacaaggttaaagaatatgaatttaccgcctgtgcaatcaactgcttgtttttctcctcttccatttgtaacttctccaccattactgcagctagttcggtttcagcacggtttttggccctttcttgttccataagcttttcatttgcttcctggggaaatgagtatttcaataataaaaatctatgtactatagcaacttaaaaaggatagtttgttcgtgatatcgtaatacattagattgtttgttaaagaatatgaatttaccgcttgtgcaatcaactgtttgtttttcgcctcctccatttgtaacttctccttttccattagtaaattctgttgcatctctgctagttctgcttcagcacggtttttagattcaatcaccctttcttcttcccttagcctttcatcattttcttcctggaaaaatcaagattttcaataactacatatgtatgtactatagcaatttctgttaagatagtttatttgtgacagcatatgctagactagattgcttttatttgatgtggttgacatggtccatgttaaaggatgggtagattttataaatttaaccgaaagtgaaaatttgaaagttatacgtacgaatgttatttttttctttgtacaaatacggatattaatataaaatcgttgattacatgataatcgctttatgtaagtgtggcacagacggccgcttaaaacgtcttcttagaaaacagtaattactagttatagagattggagtgtaaattaggtgatagaaaacagtaaccgttatgtttaaatttagacctttgttttagtgtgttatctttgtgtccctgtccagatttcaattaacatggcaatgatggcataattcattttattggcaaaaaacttgaatgaaataaaacactaaagttttatacgtctgttatacctttatcttacggtgcaactgataagtatacggtattccaccagtttgctctcctacattttccacacgggctagaagctgcttaacttgctcaaccttcttcttttcatctttacttttgttatcaaatagcaccttccgtccaccacagagtctgagaactttctgaaagttcataaatattccaacttaatacaaagatagttggaagaggaaaagagagatgtattattgcactaaaaaaaatgtaaagattttaatgaaagggaatataccgtcaagaattcagggcaaccagctctgaaataatcgtctaatgtctgatcgtcttcttccaaatcgtcaccgccagtgaacacaacaatgcaatagtcaagaatttggctgccgaatatgcactgcaaggtattaactgtagactcctcctcctttgaaatgcgacccctagcagatagaacaagcaacacagcatgtataccttcttccgccattgttaagcaattgattatttcgttacttatgtcgtctccgggcacgaacgagtcgcacaaacctatatcaacaccatagtaaagtcaaactttggtgaattattgtcaaagactctataacctgcagacttacaactatgttgttattattttaaaggatatcatacaaaattcctacaaatgtctataattgttggctcaaaattctacaaagactcttccttcactgtcatctgaattcttgcagataaacacaaccttcaataggatcatatttagatcatatactattggaaaatcttcggaagttttatcatttgcctaaagtatttaaagattaaaaataaattaagcataatacagtctacaattatctttataaagctctttccaaatttattttctcatctaattcattgatttcacttcctttttatttttattaatttcatttatttttatgagccttttcatttaattttgttttgaatgctttttaatttaatttcaaaaatatatctattccacgtttcaaatatatatgatactttggaatacatatatatatatatatatatgtattgatactatgttatcaacttttatgtcttactatatactacagttaatgacataacacatatatatttgtgtttttgtattcgtctaaaatactttttaaccactattaaaactgttttttaaaaaaatagaaaattcatctcgtacatagaataataggatgttatctagatttcttctataaaagggatattttttttattttgttttggaaagtctcggagaaaacgaacttgatttaaaatccgtaaatcgcgttcactgttcaacgattacactaactcaagtttcatagattgacccgataatatttttcaacccatattcaaacctcttattgaactagagtttcgattttatagcattgttgtcaacaatgaacacgatttaaagattttcattgcagttgatgagctagttaaatttttctaattggtatgagtttaatagtttaggtaaaattatgaagtttataattagttcataatgaattgagtagagactaaaaatatatgattatccgagttgagcgcatgtaatatatagaggtgggtatccacatgcaacatagtagctttcgttcatattcaactttcaagtggtgttaaatcacttggccaaaacaaacacttcacaaactattaatgattgctttctttaatcacttggcaacatatcggcaccggaattggtttctcaatgcatataaatatgaatttgaccgcagtgaacatatatatatatatttgtaaaagaaaaaatgatttgtattaattttctgattggtagagaaattcatattattattatattataatcaattgtgtaataaaaacacataatttttattaacaaaacacataatacttttatgtgccgaagttttatgtgcttggagagatctaatgcgcttttggatttgataaccactttctaacccaaaatattgtaattttgtttttatcttttttttttttgccaagattactctactctagatattgcccttgtaatacttttttcatttccaatgatattaacattcatagcaaaaaaaaaaagaaggtatatgacaaacatgcttattcattaggtgatagtttaggatattaagcttgagttgaagttttgatggagcacataccaggagtgtcaatgacattgattattggaccatcttgtattgcagctctgtacatttcacatatcatggtaacgccttttgcctggtttttagatttgaactgctttgtaccaagaagggtgttccctgtgctgctttttccattaccagtacggcctaccagaactatgtttttgattggctctgacatatcgaagaggagaaaagaaagaacgagtttcttttacgttttctagtgtagaacaagaaagaagaagaaatggacaagttaacggacgacacaattgaagcttatatacgaacgagctttctttaccaaatcgcttgctgaaatttatattttcatatttttatatttgctaacaaagaatctcaataaacaaaacaaattcaattggcaattaataatattgatagtgcaattggaatgacgaaccgaaaggccaagacgactttttgaattttgaggagtgagatgactttgactttgtgaattgttaaccactcgctattagattcaatttggatattgaaaataataactataatcatctactaggtttattaaatataatacgattgtccgtaagaaaaaaataaaataaaaataaaaaaaataataatacgattactattacataaagtcggcgagttcaataaactttagcaatcaaaaaccaacgagaaaagatattttttttcttctagagcaacaagtcggtaaaacaaagatattaagataggactccaagaactaaaaaactaagtaaaccatgaagctagaataatccacgaacaacatatccaaaatttcaagacaaaaataaagcaaccactttgtaacacttcatttcgttatatatccaagcagatgagtttaagtttattatcgaacatatgatgatcataaaataacgaaacgcaaaaagattgactcttattgttcgtgatttaagtttattgaagtcagaaaagaaaaggataggaattaattacagtaaaatctttacaaaaattaatatatttcaaaattctattaacgtatagagacattaaattattaataaattaattattaatttatagaaagattttattaatttgataacttttacaaaaattatatttcaaaatagtttttctctttataatcgaatatcagctttttaaaaccaaatataagtaaaaaaataattattaagtttagaaaataacacacctttttcgatatggtaaaaacgttaaaaataaattcaaccaaaaattaatacaaatttttaaaaaataaaaaatattagagttatatttcactaaattattttaaatataatattttacatacctaaattactatagaataatttggtgtgtacatatatgatatatagaataatattttatattcatattatatataaatgatatatgtatatatatattgataagtttatacaattattaatttatgatattaatgagattttacatagaattttcaaaaaaaatattatcttattattttatcaatttgtgtcaatttttacatggatcggaccgaaattttttattaatttataaaatttattaattaatcgaacattaatttatatagttttttgctgtattttagtgtatttttctctcaaaccggttaatatcagataaccgaaaaaacatgggtttggtctgctctaaaaatctaattacttttcacagttccgacggaaccgccgcagctgtagtcatcaacaagcgcaattctctaacaaagtaacaaagaggaggtatttgtcaatcaatacctttcttcgtcgattcccttagctgatgtgttgttattttcgaatttgatttgttggaacacacttcgaagcttgggatctgaaatatctgattctgactgtatactgtagtcaaagatgggcagtgaaagtgataaaggtagagaagcaattgttgaagaagaagaagaagagatagtctgcttggagtctttcttcatcaacgatgagtaattttgttacacaaacaaatgtttgttttatttggtttttaaacttagatcaagtgtctgcttttggttttctcaatatacatgtttgttttgtctttgtcggatgcagttatcagttgacgaagtttacgtttggttctcatgttcttgagctctactgtctccaatcagcttcaagtgagtttcatctttattttgatttttgtatcaatgttgcattgtatttttgttctttagataataaaggagcaaactttattggttaagttttgaggtttgtgttataagtaagctgattaacaaagattttattggccatggagaacttttgttgtttctatactcttcgaatcttcatatagttatcattagtcaatcttgtgtcactgagctatattctaggctggtgtattctttgaacttttattgccattggaagactaaatatgagattcagataccctttttgtgaatttcttcatcaattatttttgactatgaactgtttatatgctcttgaaatagtcaatctggagttacttatctgtattctaggctggtgtattcttttaacttctaatgccattgaaagactaaataagaacaatgagttcagagatatatttttttttttatctaaacccttgtagtgtttatcataaagctatgtctaaaatgtttcttggacagctgattttgatttaacagggcagctggtttggcctggtgcgatgcttatgaatggttatctctcagaaaatgctgacattctccagggatgttcagttttggagttgggatctggcgttggtaagtgctgtttatttccccctaccattttccatttcgattggaccactctcacactctgtatgtatcttgtttatcctagtatgtaatggctaatcactacttgtgcatgcgtcttcaaatttcagttagagatgttatgtattgtaacatcatcactccctgttagatatgctgtatatacaaatatggtctttgcatactctgcttggctgacttcaccatcattcacatgtataaactcttatatttgtgctctttcttttgtctttgagaacatactgtttttatttttttccggttttcgttcctgtgtaaaactgatctgtaatcttttataacacaggtataactggagtcctatgtagcaaattttgccgtaaagttatttttactgaccacaacgatgaagtgctcaaggcaagattacgttactgaagatttgatatgggaattcaacattggtagaatataatgaggtcttttaaatgaacttttcagatactgaagaaaaacattgaccttcatggacattcaagtggtcccaaaccctcagctggtgagaaagaaaatcaactaagctattgactctcattgttcatattattgatgtgttctgtttctcatttctacctacagaattagaggctgcaaagcttgaatggggaaatagtgatcagcttggtcaaattttaaagaaacacaatgatggctttgatcttattcttggagctgagatctatatccttatgttcgttaacgaattctttatctatccgctaggacagtggttgatcttagttttatccgtagttgaagttttggtccggatcttctgttcagttttcatcagttaaaccgtcatgggcactcctataatttacaccggaatgaaaaagaaaaccttgacattacgtaagctttcagcaatcaagtgtgccattgctatttgacagtgttgagcagcttctgcggatcaggggacaaggaaactgcaaattcatactagcatacgtatcacgggctagacagtaagtttgtcagctaaaacttttgcatttttctcatataagtataactgcaagtttcatacgagtcagagaataaactatctgaaacgttatttcaggatggattctgcaatcttgagagaaggcgctcagcacgggatgctgatgaatgaagtttctgggactcggtgtaccgtaggaaacttggaaggggtcatatatgaaatcacacttcaaaagaagagaggaattgtgttcgagtaacttagttcctttgatacctcagaattttgtaacattatttttatgttatttagatgcatacatttttggtgaaacgtttactaaagttacagttcaaaaagtatacaatgacatttgtggatgctttgaagtgaatccacattgttagctgaaaaactgttgcaactatcatatctcctttatgatagttgtcatgtccaatttcttgacttcacctacttatcagttttcatgtatatcattctttttgttttccacatcaatggatcatctttatcctgcgtgactttaaaagtaaatatttttcagtcttattttatcttctatattatttttcagttttttttttttatcttttacattatttttcagtcttattatatcttctatattattttcattcttatttttcttttgtcggtattttcattcttattttatattctaaatcatttttcagtcttattttattttccctattatttttcagtcttgttttatattctacagtattttcagtcttattttatcttctttgtcattttcagtcttttttatcttccatattattttcagtcttattgtatcttccatattattttcagtcttattttatttatctcttacattatttttcagtcttattttatctgaaagtgtcatttaggtaggtgcagactgaagatattgggactttagttgatattcgaaaaaaaaagatattgggacttaagtttgcaaagttttactactatagtaatatcgtaagtacgtaaaagatatattttactaatgttttaacaaatcgtttaatatcataaaataaaataaccatgttatttatttttggggaaagtatttaataaaaatacaccacataatttctattcccacaaaaaaatacacgatctattttttcgtaacaagaaatataggcttttttttttactcattttagtatttaaagtttaaaccaatattatttatttaaaacaaggactaccacacaccacttggttagggtcaattttattcaaataaatttccaccatataataacttaagttacactatacagtttactcaattaaaaatttgttgtccaatcagtaaagaaggaaagaaaaaaaacatgttataaattgattgaggtctaaattaaatgttggtcatcttccaactccaaaaggacccctcccaaccagaattagtggagataaacttgacgcgtcccttcttcattctccgtcttcttcacgtcaccggaaaaacgacgaatctcattgcctgagattcttcatcggaattaaacctccggaggaattaatcacggtaaatttcagactcttcgttatctcttacgctgatcgaattcaatagaatgttagggctgatcacaaagagcgatgatttttgcagcacgattctgttctaatcggagaacatttttcctaattttgtgaaattcatgttgaatttattgattttccggataattagtagagaatcgattttggaatttgaatgataatttgtggtatatttgaacatattttttgagcaatggacctgaccattttctccagagaactcaaactattgctgaaaaatgcaatggaatggggtgagacgagcccattctatatggtgcaagagattaacaaacaacactcatttgcatcatccttctattccagtctcacattttttcaccatgtcgagtttggaggagccgctaagctttgacaagttgccaagtatgagcactatggataggattcagagattttcttccggtgcttgtcgccccagggatgatgtcggtatgggacaccgttggattgaaggaagagattgcactacctctaacagttgcatgtgagtttgaaaatatatatcaatctttgttttcctttcatatgacaactttttgtttcttatgctcttgaaatgtatgttaacttacagtgatgatgataaaagctttgctaaagagtcattcccgtggagaaggcatactcggaaattatctgaaggagagcatatgtttaggaatatttcgtttgctggaaggacttctactgtttctgggactttaagggaatccaaaagttttaaggagcagaagtatagcacatttagcaatgagaatggcacgtcgcatataagtaataaggtaattgtctcgatggaggaaagtagtttttgacctctatataaaacatatccacagatacctcgttccccgtctatgtaggatagttttgtataatgattcatctttttcatttctgtttaaaatttcccactacaaccaccatttttttttctctcttattctgttttttttctgtttggaatttagatctctaaaggtataccaaagtttgtgaagattgtagaagttggtccaagagatggcctgcagaatgagaaaaatatagtacccacatctgtaaaggtggaactaattcagagattagtttcttctggattgcctgttgtcgaggctacaagttttgtatcaccaaagtgggttccccaggtaatgctgttatgctggtgtatataaattatatctttcctgaactttcctgtttggtgtattgtataattaagcatataaagcgaccactttgaagaaatgactatattatattgtagatagacttttagaaatttctcataaaaatggaacccttcgtagagttagctgcaactaaatagtttttcaagatgcaacaatatatttcttagtttgttttgttgggatttgcatctcaccagtagtgtacttaggaacctgtgttgaaaaaaataaaactggcaaacagtgtcttatcacacatcttacggtcttgcgtgtgcctaaattcaaactgagcaccaagcatccatttctgggaatttctattggttacaatcaatggttattgctacaagatattcaaattgcttttgataggtaaaataatggggaaaaccattttccaagtagaggaagtatggtagcatttagagtatagaaacaatatctgtagtggatgcttatgtaaaactaatctgactgaacagacatttatactatttcgccttgtagcttgcagatgcaaaggatgtaatggatgcagtaaatactttagatggggctcgattaccggttctgacaccgaatctaaaagtctgtatcatatatttcttaaggctctccaacaattcttggtttcttggtgttgaacactaacatggggtgcttgcttctttttagggctttcaagcggctgtatctgcaggtgcaaaggaagttgcaatctttgcatcggcttctgagtcattctccttgtcaaatattaactgtaccatcgaagagagtctcttgagatatcgtgttgttgccactgctgcaaaggagcattcggttccagtccgtgggtatgtttcttctaatttttcttacttgtgtacactatgtgttcctcctagatggcatctatcaagaatggtgcgggaatataatgtaactatttacctaatcaagttttcgttcctctgtgctggaggaaatcataattttacacattaaactgtgcatggatccaaaatcctatgttgtgtttatctcagttgtgtgtttaatgtacgtgtaacaatatggattttggatcatgtacagtttttctagtccgaacttcatttactatcaagcttcttcaagtagttcagttctggtttagtgcatcatattatggacccattgagtgtttttttttgtggtagaatagaattaaccttttttccaatctccgaccctaacaaaacactaatagaagaaacagttggttctaataacagtctatgattatttcccaatattgaaggtatgtatcttgcgttgtggggtgtccagtagagggacctgttctaccctcaaaagtggcttatgttgtgaaagaactctatgacatgggctgctttgagatttctctgggtgatacaattggaatcggcactcctggtaatttcgttactgaaaatcttgtgtagtttattcaattacgcatgtgcactgtatgtgggagtgataaactctgaagacatttagcagctctgttattatctattagactgaatgtagatgaataaagcggttgttagttggttagagagtagatagggagggctggatttatgcgcattttcgttgagagttgagtctctcattaatcaagtccctctgtttggtgaattgaacaaatcaggttctgtggttccaatgcttgaagccgtgatggcagttgtgccagcggacaagctggctgttcacttccatgatacctatgggcaagctcttgcaaacatattggtgtctctccaggtaagtcaagcactaatagaagaatatttgattataaatataacttcatttatggtttgacatgtattggtgcaaaaacagatgggaataagcatagtagactcatcaattgccggattaggcggctgcccatatgcaaaaggagcttcaggaaatgtagccacagaagatgtggtttacatgttgaacggtttaggcgtccacaccaatgtcgacttgggaaagcttatagctgctggagatttcatcagcaagcatctcggtcgtcccaatggttcgaaggctgccgttgccctcaaccgtcgtatcacagctgatgcctccaagatatgagttttattagaccatctccaatgtatagctctatatcttactcgaaaatagagttactctctacaatttatccctctattttctactctaaaaagaatattcttaaaaaatattctatttctattttatatactaatacattttatttatctaatttacaatttgaccccacatattatagttttgcaaagtttccataaaatataatattatttacattacactcattatgtatatatacatataaaattatgctttgaatgagctaaagaaaaagaaaaaaaatattttgtaattggaattcctttaaaaaacaaatgttatggtatattttgagactgaacaagcacgaattttacaaaaacgacgtgtccaacaacaagatcaaaatcaataaactccttttccatctatttcatttggacaatgttttcactatcttcgcggatctacaatcagtttaccagaatattaaattactagttttatgatttagttttgttatgttgtttattttcgctaccaatttggtattctttttcgtcatttttataacaaatgaactaccacccaactttattaaagtcatgcttcctactcatttttcaaatttcaacaaaataatttctttgtggattgaataatttatgttagtttctaaaaatttgaataataacatatgttaaagatctcgatgagggtaatgaaatagacaatctcggaggcaaaaaccaagctgtggctgggtgaagtgtaactcgatgagattaaagccagttggatcatcagagatagtaatggaaattacttgagctcagaacataacattggataagatgcgtctagtgcgttagaaagtgagttcaaggctctcatattggctatgcaaaactattggatacaacaggttgtatttgaaagtgactgtcgacaactgaatgaccttcttacaaagaagacaacgaactttgagattggttgcgagaaattcagttattgacacaaaggttcaaagagttacaatttgaatggatcagaagagagtcaaacaaacgtgctgacatcctatcaaaacaaagtctacaagacaatgtgctttcaatcttccatttctatgtaccaagctctattagagaggttttacaatgtgataactctgtcgtctaattaataatatctcaaatgttccaaaaaaaaaacatatgcaaaagatctatttttattttattttttttaatggttacatgataattcaatttctacaaaacaaaggatcaaagaaatatcaaatatatatatatatattttttttttttgggcaaatgaaatatcaaatatttatttcttcaatttgattggcaattaaatacatttggaactaatggaaaaaatccataaaccaattttagacttactagctaatttaaatggatcggagtgttctgaccaatgttatgggtttagggtttaaagattctctcatcttcttcgattactctgtcaatcaaatccgccatttttgatgcggttttctccaaccttcttcttactctcacaattgcgattgactcgacgaagagcagccacctcttcgcgtttctacgccgtctctgctctcaacaatcctaataatctctcagactctgagcagcagcaggtgaatcatcttaatctctccaagcttactcaacatggtcttcagcgactcctgaatagtaccagagatgacccaaatctcgctttgtcgtttttgcgacagcttaaggaacatggtgtgtcccctaatgtcaatgcttacgcaactcttgtcagaattcttactacttggggtttggacatcaagttagattctgttttagttgaactaattaagaacgaggagcgtggtttcactgtaatggatttgattgaagttattggtgaacaagctgaggaaaagaaacgatcatttgttttgattcgagtctctggtgctttggttaaagcttatgttagtcttggtatgttcgacgaagctaccgatgttttgtttcagagtaaacggttggattgtgttgtcgatataaaggcgtgtaatttcttgatgaatcgtatgactgagtttgggaaaattggtatgctgatgactttgtttaagcaacttaagcagttagggttgtgtgcaaatgagtacacgtatgctattgtggttaaggcgttgtgtaggaaaggtaatttagaagaagcagctatgttgcttatcgaaaatgagagtgtgtttggttataagactttcattaacggactttgtgttactggagagacagagaaagctgttgctttgatcttagagctgatagataggaaatatctggctggtgatgacctcagagctgtgcttggtatggtggttcgcggtttctgtaatgagatgaaaatgaaagctgctgaaagtgttattattgaaatggaggaaattgggtttggtcttgatgtttatgcttgtttagcggtgattgatcgatattgtaagaacatgaatttacctgaagcattggggtttttagataaaatgttgggaaaaggattgaaagtaaattgtgtgattgttagtttgattcttcagtgttattgtaagatggacatgtgtttggaagcattagaaaagtttaaagaatttagagacatgaacattttccttgacagagtttgttacaatgtcgcgtttgatgcgttgagcaagctggggagagtggaagaagcttttgagctgctacaagaaatgaaggatagaggaattgttcctgatgtcatcaactacacaactctgatagatggctattgccttcaaggtaaagttgttgatgcccttgatttgattgacgaaatgataggaaatggtatgtcgcctgatttaatcacatacaacgtgcttgtcagtggattggccagaaatggtcatgaggaagaggtacttgaaatttatgaaagaatgaaagctgaaggtccaaagcccaatgctgtcactaacagtgtgatcattgaaggcttgtgttttgcacgtaaagtaaaagaagccgaagatttcttcagtagtttagagcaaaaatgtccagaaaataaagccagttttgtgaaaggttactgtgaagctggcctttctaaaaaggcatataaagcattcgttagattggaataccctctgcgcaaaagtgtgtacatcaaactattctttagtctctgcatcgagggttatctcgagaaagctcatgacgtactgaagaaaatgtcagcttatcgagttgaacctgggaggagcatgtgtggcaaaatgattggggcattttgtaagttaaataatgtgagagaggcccaagtgttatttgacacgatggttgagagaggactcatccctgatctgtttacttatacaatcatgattcacacctactgtaggctaaatgagttacagaaagccgagtctctttttgaggacatgaagcagagaggaatcaaacctgatgtggtaacatacacagttttgcttgataggtatctgaagttggatccagagcatcatgaaacatgttctgttcaaggagaagtgggaaaaagaaaagcttcagaagttttgagagaattttcagctgctggtattggactagatgttgtatgctatacagttttgatagatcgtcagtgcaagatgaacaatttagaacaagccgctgaactttttgatcgaatgatagacagcgggttggagcctgatatggtggcatacacaactctaatatccagttattttcgcaaaggatacatagacatggcagtcacacttgttaccgaactgtcaaaaaagtataatataccgagtgaaagttttgaggctgcagttaaaagtgctgctttgaaggcaaagagatttcaatatggggaatgaagggttataatgagtgtaaatcttgaacgtcaagtgtgactttggtgatctctatcatacatggtctatgcatcagatctggaggtaaaaggtagaattcagcacattgagaagaatctttggatctgcatctgcgtgaaggagtgatttttgaagaatgtttatgaaaatgcgcttcttacctgactttactctggtaagagttgtttcttctcccaacagtggccaaagcacaaactccaagtggatgcagttcgttgagaatgtgaaggatcaagtcaacaatgcttattctggttagttcaaatgctgcttttatctattataatcaagtttatcgaccagatggtttctatcataggagtgattgtatattcaatgccataaccaaaccaaaggacatatccgtaatcctgaagcatgagtaatcaccaagtactaataactatgcataacctcccaaaatggtctcgatttttcactgtcacgtatactgcaataaaagtaagtctggtcttctcaatattaagaatacattaatacttggttggttttttgatcgcgtatcctaataagagagatgatctgttttctctttgcgcagagaatattaatgtggaagatcagtttctgcttgtgagtacaataaaggcattccgagtttgtgaatgctgcaacctgagtcatggatcaaagacttgatttggtgatgaaggaccaggcaaaaaaccctaggcctggaaaggaaaagctatgtcctccaaatggtcatttatgagctctgtttgtcaggacgagattgctgattttgatatgtgaactcaaagatgagacttgtgtttgctaaatctacagaaggggaatgaagatgtcgcgctgttgaaagagattgaaagacagagagagaggctgcgcgcagaattcctgcataaatattaactggcagctgtctgattatcagctatctaaattctaaacaatggttataggacgacgatacatcattcatggtctccttgtcgtttgatgtctttgtgacttttagctccaataaatttcaattactctgtttgtaatgcctgtgatgatataataatacgacttgtgaaaaaaaaaaaaaaaaaaaaaattcaattactcttgggtttggtttacgcgcctttactgattcactttttttttaaaagggattgagatatacaaaactattatcttgttgaggacggaatccaaaaattacaatgacctaagtatcacaccataattaatctatagtgtcgatcgacttggaagagaagtcccaagctcagtggtcctctacaataatcatacacttgattcgtagtagtcgcaatgactgcaagccacacgatctcttcacaaggaactggtcaagcttctaaatacatggtgatttgatcgtgatttgcagtttggccaattttgaaatttgggtttccgagctcagctcacaaacctcgaatgtaagaagtagatagactggctaaaaaagccgtgaataaatttttaccatcagggaagaaaagtaaaaacttagaagatatatatatcaatgtgaacttgtatataagtaaacaaatacaaagtaggagattcaattcccatttatatcaacttcaggcataaaactaaaatcttctctgtgcttgcttagtttaacgaagggagatttgcaagagcatccctggattttctcaacaacgacttggcttcttcactcttttcgagttcaagtaaagaaacaacctcagccttaaaatctacttccacgggatgcaaagacgagattgtgctatacagttcgatgagctcaagcaggcattgggaagcagccacatgaaactgaggtttttataacaaaaaacattcaatcacgattaacttgaaagacaagatatatatagcttgtgaggctattactacagtcaaatggaatatgcaaatactagtatgaagaccgtcaaaactaattcaatatgcaaaccactggtggtaggtagaagaatcttgttgaataaaattgcatagattggattctatcgataattgattcaaatcttttgttaacggaaaccggacttagttgaacccactcctatactaactcgagaagaagatactccaaatgcaagtaaactataaataattaacgagacttttcaagctaccccgattaaaacctaataaagacattaactttcagctcatgaggctatttatgccccctaatgatctgttccgttaagaaagaaataccaaaatcacgaaatttgtttcggttttcattcggtgtagtagactgaatacaaaccagagaaaaacatacctgtgctatcttcacagtgtgtatgcactccaggagtttaggaactagtgagtgaaataactggaaagcaagcagaaaagttaatttgcagttaaaattatacacgcatggggtaataactatagatgtgattaactacctcatgaacgaattttgtcgcatcactaggtgaaaggtcatccatggagtcagtccatagactcggaaaccttgaacaaagctttcccacacatgaaattccagacatttttactgccacagaagattagattgattaaggtaatgaaaagtttactggaagataaagtgagagaagaaaccagtaccagtccacagaaaaccaggtgataaggaaattataagaacatgaatcaaatctgcttttgcgctaagaatgtcatctatagttgccacttggatgcaagacttgacgcattccataattttttcaagagggacatgtccatcttctccattttctgattctgaaaacaaaaatgtggactgttcagagtactgagacaattttctgatgctacatgacctaactcgtatatgagctattcaatgaggtaaggggttttcattttctcgatcaactttcggtttattgttaaacaagcaatgcttgacgagcatctgactatttcttcttcaaatttcctaatctaagttaataatcacccagctggattagacaagaacacaagaactaacagttactactcaacatatatcccatgtaaatgtaagagtgttatcagtcgaaggataggactaatgggattctagagtggtcgtgtaacaacctgttttgacagcatcacttgctgcctgaacttgagtgttcgttttgatggaggcagtattacacatctcatacaacatcgggaaaacggcatggaaaaactttggatcgccaaaagctattatgacctgataaatataatcaaaatactcataaatccactaaccgaaatgctgtgtaagaactgcattattagcagttttagatatcatgatcgatctcaaaatttttgcataggaagccacaactagtcttttacttaccttctccagacaagaaaaggctgactcgcgatatttcttgagtttctttttgcatgcagaacagataagactcaagatggtagtcggagttgttgggtcctccttagttattgcctcgtggcaagcgactgaaagagcacctagggcatccaaaagagcatcctttccctgcaatcagaagtattgacttgaaaaactagtgcaacaaaaatgcatttatacacacaccagctctatccatccacagggacaagtaaagcagagctgcagctcttagtcgagcaacaaagataattctctcgaaattcaattaatctgctgctacagtatctcaattaactttttctgaaccttcaaggaaaaggaaaataaatattaattggaatgaaagaacttgtcccacctcccataaacgtccaggaatttcattgacaagacattgtagcaatctcttgtggtgtggcgataatgattcacccaagacttcagttagtttgcaaattgccttaccagactgaaagaaagtttaaatcttctatgagtaaaacagcaaaatatcaataagtacaacgaagagagaaaactggcacgagaaagataaaaaagttgccttcttcttgcttgcccacgaggatgatgtgatgctctcgcagatatgattcacaatttcttgcagaaacaactgtagtgtgaccctttcaccacttgtgatgtcttcccacacctcctcaaagagactcgaaatctgtttttcatcctcaaatctgaaatttatagccaccgtaagcttctcatgtattgtcaaatagaaggaaagaattttgattctataaggaatttctgagtctagggaaatgttttaaaaatggtagcaaaaaatctgccaaatatttacaagagaaaaaatataccatgtgaccttactcggggacagtagttgaacatgggaggtatgaatttacagccataattttcttgatctttttccaaaactgattagttattttgaggtttcaagttccttatgcaaaatacctcacatgcatcagattcaacagtatgcagttacaatggtttacctggaaataaatatagctggaacaatagccgactgatgactgctcataatatcagcagctgtagatgagaagcttttgaacagactcgcacatgcgatctgggagcttctatcaccagagtgcagagctgcagtttcttcgattaagctttgagcttgagaggggctagaatacttcaatacaatgccgcaagcactcgaaaaggcacgttttgcagcagaacttttctcctctttggcaacaggaaacaaaagtctcagcagcattccagtgaacggctttatctcggaaccaactttttgaactagcaatgagataaagctggcaacaccaactctgtcaagaaaaatgaaattttcaaaaaatatcaacctctcatttgattacacgaaatctaataaaatgagacaagactactacactacacatagaagttagacgagtccattgagacagtctgcatgcatgaaaaatggacgagaaggtatgcaattgtgtcactaatgttaaaccaatcgaatggttagagacgttagacgagagtccattgaggcaatctgagttcatgaagatgggcgacatggaattacgtcactaatattacactaattgaatggttaaaattacttaagcctaccttatgtgaattcatttctctctcgagaactttttacaagtcatgataagaatcatatcccctatttaattccctaaaccttttccttttcgggggtttagatggcagaggcaggacactggtaaaaaatagcttatcatataacatctggatttatatacttctaagatatatactctcagattctcagtaaagttatccacagtagaaattacaaaaagctacacaaataataataccatactccttaaatcacgtgaatacatgtaagctagtacggaaaaaaaaggggtagagaaatttcgaaacatagttcacttagatcagagtaaaagttaaatgacaaaccaaataaaagaaaatgatggaaaaccaataatattcagtaactacttacattatcatgatctttggcccctactatttaaagcttactttttaaaatgcaattaatttgacaacggattcttcttaccacaatctcaagttctcttacctctataaatttccgtaataaacttagcaatattatcggccaaaacccaaacaagaaagattttctcaagtaaaaattgtagatgaagtagttcgttacatatataacgttttaaataactgacctcgtattgaggccaacaccaccccgaacaagttgagtgagacgagggatcaattgttcaagtgattcaatatccactatattaatacacagatcaagtgtttcccacattggagagcctttcgagattgaaattcgtaaattttcaagtttctcggtttctatgccaatattggcagcatgcaactgaaataaaataatttatatttaatacgatttcaggacaaggtgaagattgaaactgaagttgctgacagtaaacgatacctcaacatagttaagtccttggtcttcaagactagacaaactttccaacatacaacaaactaagtcggacaaatgtggacggagggcaactcctgcaccctgcaaacggtaacgaatagcacaaaatcacttaaaggatcataaatatttccgaggaggacattcagttcaccaaaactagcaagtaattcaaactgattaattatttcatgtttggagtaaaactgaaagaacacaccaagacaaggttaagttctgcaatctaggtttactgattactcaactgtattgaaataaaattaaaatgtaccactaccaatgtcacaagaataatctctgagaaacaggcatgattactcatcaatctaccaaagttagggctaacctttgcaagcttcataacaactccaattgaagccttacgtacactgttgactttactcattattccttctgaaagcaaaaaaggaagaacaatatccatcgcttgttttgcatctgctagttcggtaagcgtgacatcacagatccttattgttaaggatgtcacggcacgacataacttatcaccagcatttctcacagtttctttaatgtcatccattgcacggaaggcagctatccatagttttttcaaatgctccttgaccttttaataacataagggcgtgaaaaaacaataccacttagaaaatctgatagaccaacaatgtttacatacaagatagaaacaaccacgcagctgggttgatatatatatcctatacttcactacaagcaggttcaagaatccaaaaaaaaacccggcaggtatgtaaattgatatgcaaaaggaattaacaacagcatccgaaaccagaaccagagttcaagatatagagtttaaagtgatttatacatgcactagaatttaccgatgcagtatgcagagccgaagcaacgggaaatttccttttttgtatgttaaaatacgaagatctcacctggtcaaatttccgaccttgaataatatcagcaagagccaaacaggatgcctcacgggagcgccaaagccgtgaaccacattgtactagcagatcatcgaagatgtgattcaaatgttcatcaacagctttcttagggtcttgtatcagtgctttccaaatgtgtgccatcgcatcctgccaagattacatgaaaagtagcaattactaaaagaagcaaacaaacgctatggcaaccttttatgacaagatgaactgccaggcaggtgtaagtggtatcacttaaacagctataactttggcggtgaaatacatgactaaagtgatttatgcagcttgtagaagtgcaacagctaaatatttctcgtgttaaactagaacaatctactgatttatacacaggaaagaaaaaatgctagaaatgctagaaatggtgtcactcagttcagtttaaataagtcaacttttagtcgccagaccagtgatgaatatatagcttgaatacgctgatatagagtaacagcacaaaacgtagaaatcgtacctggacatttttgtcaggatcatattggtaacgaatcaacctcggaatcaacagtcgcaaatgtggtcgaagagcatctccagcttgcttggctatcttggagaacccaaaagcagctcctctctttgagttaagagaagcttggtgattggctaagtccataaatttgtaaattaaatcaggttgccccatttcatttgcaagattacaaagctccttgtaagtgctaatcttccctccactaggactctcaccgatagttccctcttgaaacacttcagactcctcaacaagctggataacaaaaattcttgaggaacaaatacaaaaactgaagtacctgaaggaaggacctagatggatagattttaccttaatagctcgttttcttttgcttgtgcctgttagagtatttaccagagcatctaccaggcttttcttcattgatgcatcaccaagttcatagatgatgctcatgccctgggatgccagctcctgtgtaagttcattctggtcacctaacaaatgtgagaaagcctcctgcgaaaaaatattttagttaaacagcggtttgtacaagcttctacacattgtagagttgacaacatagcacaagtcatggggcttttgtgataaaatagtaattgatataacagttcaaggctccgaatgggtaatgcatataaattaactggaatgacaatgctcataattttccttataggtgtgatggtgcaggggcgggttacaacagcaaagaatcttcccattacagctcgctaacctggatttttggaagcattagttggattgatggctgctggccacagtacatggtcaaagacagcatccacacagttccagcacatcgttcctccttcctgctactatacagaagagtgtcaaagagttttccagtaattgtttctctggttgtggtacggctatcttcctcagtatcagttttgacatcagacaaagatttaacttctttcatcagaaaatttgagtccgtcgaaagagaagtataattagttttcagaatcatatcagcagtaactggtacaccaccccagaggaaagatagcgcctcaccagcagcaaacaaaatttcttcagcctggccaccaacaaatgtacaaaatttagaggtttactcagttctacttgaattc

SEQ ID NO: 289 - DNA, 99345 bp, Arabidopsis thaliana
aagcttatcaaatctcactcaaccaagatgcttggttataaaaatcgaaattaatcgctagttatttttggtagccagagtactgataaatgcaaaaacatgattaaagaacttaaatcattgaaagatagagattagacgagagaaaaatcatttatgtattatgccttccaaagaaacctcttctacttggtgttatatgaatccctcatcgagaagtagtcttatccaatcgtcatcatttgttgtgtttctctcatttgaaccaacataacctaaatctgtttcaaaattgaagttttgtcatgcataaagattagtggaaacctcttgaattgaacacacaaaaaatgaagtgattgtaatgtaatgcgtagagactaaaaaaggtttaccagttgtgtttgcaatgtctggtgtagcatcggtatggctacgtagagaggactgaaacagttgggactccgaactggtatcggttttcggtatttctcctaatgaaccgttaacaactgattccaacaattcatccaacaattcatcatagaatgatgatgggaaatctgttggtgtctggcctatcagaggagactggaccaaagtgttgtgtggctcaagattcagcattgggttatattgttctgctccaaaactgctaggctcttcatgaaaatcaaagccttggaatgaagggagctccaagttctcaacctcgtgaatgagaggcataggaggagaagaatatgtaacatttccaaacaaatggctgtcaggtaactgttcttgagtgctctccacgtaaggattacacaagagagtagggttttgctcgttcatggcagatccacccgtgaaaggaaatgttgtttctggttccataacgcgattgcggctaggctgaacattggcaagcgttgactggtaatacggagaacattgattgagtgccaagttattgagttcttgaggtttctcgacattgcctgccatcaatgagtcttgactataatgagcattcaataattcaacttttacaccatattgtgctgctgtacgtatcgcctgctctcgaacttcatcagggtaaactggtaaaccctttcctttcaatcgcatacgtcttgcgttccaaaaattctttatctcgttatctgttcgaccagggaacttaaagaaacaaaagtttaaatcaaacagtaaaagaagatgaaaatgtagagagtgaaaaaaaaaggaaagagagttacatacttctctagccatttgtgaccatttgttccccaaaacagcatgaagttggagaacacgcttctcttcctcatcggtaaagggcccttttttcaagcttggcttaagatgattcatccaacgaaaacgacaacttgcaggattatgaggaaggcccgtgcgttttggaacatgagtccaagttctatcaccatattgaataacataatctttcaaaattctatcttcctctggtttccatttagacttagtaaaagttttcttcattgctaataaatcattcgcttgatcctgaatcatggaaaattttacccatcatgaatgagcttcatatgtaagtattcaggagtatcaatttttttcctagcaatcaaaatcaacataactttataattaaaaaatggagaaactagactttgtttgtgcaacaattcatcgatacatataaaacccacagctcattgaatactcacatcaataagaaatattttaatcacaaatttagagcatatagggagactactggcaacaaattgttcatagaaataaactttaatctgtatattcattacttaaaattttcaaatttggctacagcaaaactcaaatattttgactaatagataaggttttttttttctcattgttggtgaggaccaaatattattttagaccagatcagtctcgtcaatatgttaagaggttaaatggttgaaaatatattttgttgatgaaacaaccaaaaaattcggaaataattttactattgatattgattggacaatttcaaaatgaattcgataaacaaaagaaaaaaatattagataaggcgagattagatttccgacactaacctggtgttaaacagatcttaagaatctatttttttagtgctcagaagagtcatcccttgaaaatgttgtttaagaatctgatttggtgtacaatttgtcaaagagtggagaagagaaaaaaacagagataaccggagtaattttaaaactactttactggcggaaaaccgaaagctagaaatcaaccttatgtaaacaaaagtccataaactacgaccacatataaagataaggttaactctttttcttacaccatataaggttaactttttaaagtgaattaattaatgtatatcaaagatttacttccaactagggtactctttaaaaggtgagtttttccttccacttaaccatttcttagaatgcttatatccccaaactctttggcagttttccttaaaatgctcacctttactctaacgaaggtcaaagttattaccaagatttcaatacttctttacgataaaattacattgttttaaaaatgaaacaaaactagattataacccgcggtgtaccgcgggactattatttttttttaaagtaaaaatttaacttgtttagtacattaaaaatatatatgatttaatttttttgtattttctaaatttataactcttatatctatatatttctagtgtacaactagtatgtttgatttttactgtttacaaatatagaaacaataacatacagttcaataagttaaaatctagattaaaactatataatttaaatttaaattatattttttattaatattgtttgttttgttttgtgtttaagataatgtaattgtatcttaattgttatatctacgatttcacccgtagtataccgtcttgtattactatcgacccaaacccgtcatatcatctaatcccgttcaatgaaattaaacatatctaatagatttcacccgtagtatatcgtctcgtattactatcgacccaaacatgtcctaccatctaaccctgttcagtgaaattaaacattattttgttatttttgttttaataatactttaatttaaaataatataattgaaagggagatttacaaaactaccattttttactacctttttcaataatattcttttatgttgtcaatttttaaaaataccccttctcttgaacaaaatgaccaaattacctttatctaataggaacatgtaattggaaactaaaattttcccgacaaatttttggcggcaaaatttatttttcccgccaaaaaaaaatattcccgctatttagaacaaggttgagagaagtagaaaaaaaaatactagctattagatttgacggtaaagccaaagtttgagcaaatctaatacaacgctactagttaaagtaataataattccatttctttaatttttacaaaggctttaaaagtcactattacagggattctaatatgtaagaattctaatatattctccattacttgctatgtattgagaaatattatatgaacatgagatataagttaaaagtggaattattaaaagggtaaactcatgaaacttcatataggtatagaaagaaacttggttaccttactatgtttcttgacctacaattctacaaagtgtaaaggtcaaattgttttctaacatttaatggtacattattaataaatatgtttgtaagcacttataatttaaaatacttggtggtcttatagagccaactcttcttgccggcgttttgagagggatccctatagctcgtatgttctcttcaggatcaatagtgtggtgaaatggataaagagtcctgaatgatggtttttgtttctctgttctaacacctttgatgagaaagaatttaagatcattttaaatcgtccaaataagattgagttgaagtccaatccaataagaattcctgcgagttgaaactttaggagagcggtatggatgtctttcttttgcaaatctgcaagcgtccctaagaaaaatattctcaacaaataatggtcaaaaatcatcatatagtaaggtcctatttcccggttttgactcaataaaacatattgatgtaaaaattagaaaaaaatctcaagtcaacaaaatataaaaagtagcattactaaaagattcattcttcctcaaacttaaatcacaccgtctgtggtggaaaaaaagtaaaataagagagtaatagatgagtcgtaaagaaagataggttaaaacaatgtcacctctttgtggtatgatatctaggcacccttaaataacttgatggacactgcaggagctcgaggaactattgacatggggattagtaaaaatattacccttgcagctgcttgggcaaatcggaggaggagaagacataaagccgatcatttagatacaataaaagaagctctacacctacaatggcaaaaaaacgaagtgagaaagatgactgctttatggcgcggggaaaacgatgtgtttagaccaaagttctccacaaaggatacttggaatcatattagaacaactgtaaacacagcctcgtggcaacaccaacaccaaaatttggacttttaacgggaggtcgtataatcaaatggcaaggaggagcaacacagacttgtatgctctgtcaaaactgtgttcaaactcgcaaccatctcttctttgcttgtgatttcagctcaaaaatttggaaagcacttacaacaggactactcaaagcacggtacacgacagattttaactcattcatagttacaacttacaagtatttgtgttaattgaaaaaatggaatctatagaacatagttacactaaggctagctccatgattagatcttgtattcaaaaacatattcatgtgagaacaagagaaacagtaaactaatctgatgtagacactaatgaaactcaaaagtttagctgagaatgatgtttggttgatatcacaacaagataaaaagcatagagataagtaacaaaattccttcctctattcatactaaattgcgtttacagatttcttccgtggatggtttggttgcgtaaagaaaagttcccttgcgcaatacttcacagaaaaggtggtcttctttcttcaatccattcctggcatatgcacatccatcttttgatacacgccaaacctcaagcaatagtccttcaccagttgtgcataatacaactcttacatcatttcacccatgatgcttgcttccttagtatacttcccgccacaacaatgatgcttgcttagaaaaaaaaatctgaacgctacttatttttggtatagccagactatactgatatatctaaagacatgactaatctactcaacgcataaaaagacattatgcagacgaaagagaacaagcactttataaattaggccttccaaagaaacctcttctactcggttttatatctatcctcaccgagaagtaatcttatccaatcaccatcaaaggatgtgtgtccctgatttgaaggagttgaacctaaatttgttacaccaattaagtttgtcatgcagatggagaagaggagacttcttgaattgattacacaaacaatgaagtgcatgtaatgcataaagagtaagaaaacaagttttaccggttatgttttcattggctggtgtaaatgactgaaacagtgaagattctgaatcggtatcggttgccggtttctcccctgatgatccatagacaactgattccaacagtccatcatagagtgatgatgatggacaatctgatggtgtttgagctgtcagaggagattgaaccaaagtgttatctgactcatgttccggcattgggttaggttgatctgctccccaaccgccaggctcttcatgatattggaatgaagggaactcgaaattctcaaccccgtgaacaagaggtccaggaggagaagaataagcagcattaccaagcaaatgactatccggtaactgttctgaaacgttctcaacaaaaggatagttccagagccgagggctttgctcgttcatggtatatccacccgggcaaggaaacgcggtttctggttctctaggacgttttccggtagacatgtaaggagatggtggtatcaagttatacacattaggcggctgaaagaaacacggtttttgtctcacaaagacgttagtgggaggaacatgtcgaagcattgactggtagtatgaagaagatcgattgagtggtaaatgctcgaaatccacttcaggaatctcaacagtatctgcctccatatattcttgactatgatgaccatccaatgaatcagtgtttagaccggaatgtgtcgctgcattcatcgcatgctctcgaacttcatcggggtaaacaggtaaaccaagtcgttgcagtctcttaagtcttgtattccagaagttcttgatctcattatctgttcgtcccggtagctgaaagaaacaacaaaagattagaagacgaaaaaaaaaatcaagattagggttaaagaaggaaacgtgagctatacttcttcagccattcgtgcccatttgttccctaacaaagcatgaagttcgatgacacgtttctcttctttctctgtaaaagcgccttttttcaaatctggtctcagatgatttacccaacgaaggcgacaacttttaccacaacgagaaaggcccgagttgttttgaacagcgttccagtttccatcaccatgtttatcaacgtaagctatcaaaagattgtcttctgcttgtgtccaaggacctttagtaaaagatttctttattgaattgtcatcgtctgatcctgaatcttgacgaactttccccatcttgtgtcatctgtaaaataatatgtaattatttatatatatatatatatatacaagtttctctctagccaacaaaattaacctatataattccggaattaaaaaaatattgaagataaactcctttcgtgcaatagttaattaattcatacataatataacttatgaaatactcgtagaaaccttattctaacatgaaatctctctatgtatatctttttgtttttcagtgaaattttctctaagaaaagtgtattttagcgttttacagtcactaaagttttcttggtattcaaacaagcaaacaaagaaattagtaatcaatactcatgtggctttatttgttaactatatataggttttgcgtatttgaacatgttaaattgcaagcgataagtccaaagcaaatcctaattttttttatcataatctttcttattgaaagaaatctatggaagacgcaaaatggagtacaccaaaattcacaaaaggtggttaaactcctaagagacttaacgctttacttttggagaaggtttgcatgtcgcgggcagtggtggtacgatggatggtatctatcaatggaataagttgacatgattttttctgagacttaactataaacttttctcctctacacttaaatgttaaaaatgttagttttgaccataacctctatgattgagcatcatatagacagcactttttcttaatagattgctcaaaactcacaaaaataacaacatatcgagaagattaattctgctagaataatatgtatacaagattgattatgctgaatatgttagtccagattaattaggttaaatcagataaaattagtatattacacaattcatctttaagaatgatatatcaatgcataatacagtaaaacctctataaattaatatcgataaattaataatctctataaattaataaatttttccggtcccgagtttagaccaatgtgaaaattgatacaaatcaataatatatggtctcatcaatagtataaattaataattttataaatttactaatatatattataaatatcatatgtaaaatatctgtagtaatttttttcttcaatttttattaatttgttgtagtgttcaattctaatatttaacaacatgtaaaaaaagttttattgttttttaaacttaatatttgctttctacttttaattactattgttataaagaaaaaaatacattttatatcgaatttttttaagaatttacaaaagttgtacaattttattaatttatcgataaattaatacctttttagattaatcaatttcttaggttttactgtaaatattactatagttagaacttacataggaaatgattacagacgtcttaaacccactcaacaggatattccataagcactccgcgcgcagttgagaggatattggggtgtgctaaaacatcaatctgaatctagcaatggttttacgaaataattcacctataccattgataacaaaattgtgtttagtaaacaatcttgaaaggtttcgacgaaataaatccgtatctagacatgtatggtttagtacttatagtcggtttagaaatgatagatgaccaatgatatttatgggttgataaactgatttcactagtttgatagactctctattaccaaagtccaaactcaatctcaaaacatcaagaacgaaacctcccgattttttgctaggaaatatccaaaaatctacctagactttgtcctcgtgatcaacggcggtggatttgtatgatcgatcagatttaaagaagtatagatcaacccattaatatccctgaaaatatagacaacattaaaaagcttaaatctcactttcttggagtgagattaaaaattgaacaaagaaaaaaatgaagcttacctgatcggtgatagagaactaataacagaggcgaacgtctaatcctaaacatgcaaaaaattctgataatgaattgccgaaaaagttacaaaaatctgaagaggagaaattaaaaaaatgtttaggaaaaactcaccaaaaatctcaaaatttgatagagaattagcgtctgagtattttgaggctttaaaaggtatctaatatattagggtttaataaaaatcggaaaaatgtgctaatcaaaagcgatccctacaatatcggaagagatgaactcgagcttcaggttttctcgtttttgcactttagtccctagtttctgaaattatttttttattttttactaacttctaaaattatcaatttaacccaaaacgatcaatggacagtttttatcttcatctccaacgaaacaatatttaccatcttcaaaggtttttctttatcaagagaccaatacaatttaggttttgaggatacaatcgtcaagagaataacaatgccgaattcgtaaaactaaaacggatccttctaactagtaagtaagcatattgcagtacccaactccactcatctcctagctttgaatattgttttcttgtagtacttaagctcctttatactttctcttatatcatccatggctctgtgattgtttttcttggcaggagctttccttctctctgtattcacccccacaaaacaaatccaaattatgcttattaagtattttcctcattgatagcatgcagttttacagtatttatcgttacctatggggaaccatcgggcgcataaagccttgacgctactgacatcgacgagtatatgagggaaaagggcagctaattctggcatgtatttctgtaaaatacacagattgattatgctcaagaagcaactgtttagcttttatatgcggagagtggggatatatccaagttctagctacctttaagaaaaggaaatcgacatagactgagtttccagctaacagtggatttccggaaccaacatgcttctttacgaattcgatgacctgcagagcgacacacaatatcacatttaaccacaccaaacttacaaaaagatcaaatgttggtcttgatattaaaatatcacatgtgtctttaccttttgctcagcttccctttcagttatcgcactgaggagcactttcttcgtcaaccctgaaatgattgtccagatgtcatgcagatcaaatctatgggaaacacagaagttctagtacggcgaatatcaggagaggaacttaccactagctccatgatgagtttgacaccagtcatccattttatccaaacagtctttcgtttgacgtacaactaaatctggaccctgacaacagagaagctaactcagtaacaaatccggatggcggagcaagtgtttcatctaaaagtgggtgagaagtctcctgaaaacagtgttatatccacaactgaatactatgtagttccacattcttacaagaactttctgctctcttttgccctctgattacaatgattttgagacacaaacaatataccattggtcaaaatctatccttctcttagaaagtttctcgacattatagcttatcgactatgaaactaccacttttcttgattgcaaaagagtttaaacatttgttcaagggaaattcaagttggcagaaagtaaagtatagtaaaaatctatactgtagtagaaggcaaggaagagaagaatatacctccactgattgtgttaaatctccattagtaattatacatgcaatctccaatatcctgtcaacttcaacatttaatcctacacaatatagtaagaataagaatatggatgatctatgtgtaaaacaataaaacgaatcatgactaccttcaaaggaacaaaaatcatatcattgttatgacaacacacacaaaaacaaaaatctgcttaaacatatgaaaggtgaaaatgttcaaggtagacaaagaatggatagtaggtacatgttctacatggttttaacccaaaattttgcatccaagcaaatatatcaatcaaagaaagagaactttagatgtgtaaataacaggcactattaacaacactaaactaatctaccaaaagtccaatctaaaatttcgtaaaggcaggagttttataagtcatcaagaacaagtatgaacataccagtcatttccaagtcaatccaaacaagtggttgcttgtaatctccatcctcaagtgacccatttacactttcttcttgtttccctataaagttcacaagaatcattctcaaaccaacaaatcttgtagccacaagagacagtgccatgagtaaaaaaactaaagtttaaaggtcaatactttaattgactcttgacctctaaatcactgattaatttagtcaatatattatcaaattcagtctcaaaaatctaaacatggttttgtgttgtaatcaaatcggaagagggaaacaggggataccagtggaagaagaagaagccattggagcatcttcatcggcgaaagccaggacagagaaagcgttggagagtttgttcatttttttctttcagtaagactaatcggaggaaggtaacctaaaagagaaaaaatcggtctctttgacccaaaaacaaagccaaacaaataaaaaaaaaaaacggcgaaataaacttaattaacatgttttacttaaaaaatataattataactattttagtcagtaaaaagaacatataccatattggtcaaaaaataattagatagatttaattttgtatagaaattgactaatgtcgcaattcgcaaagtaatctcataattgtgaccacatttccgactaacacttgagattacaactgatttgctaccttacaatcccataactgtgaccacatttgcgactaacacttgagattacaactgatttgatatcgtatattagaaaacttttttatatatcttgtatatttgtttgatcttgataacatttctatggttgtatccactatatgtctgtattggttcgttttgtccttgttttcgaattttctagaatgggttgtgacgaaccagtgaattttagacctagattgatatgtttcttgtccaaggttttgagccaaatttacatttttatattttgataagtcttcgtaggtttgggtttgcctaatttctttggtctatgtttagagttttgcaagtgatgaattggggagagttgcattttgttgattgaactgaacttgaaactcataagcttaacacaatgttgttgtcattgatttataagtaaatatcgtttagaagaataacttgttaaattccactacgaatataaatttcatcactttctcaaattatgttcaaatgatgtaaatcgtttttcttccaccacaattctacaaatggtgtgttaccatttatatcatgaaaataagttgaataactgaataggtatttaaaaggctttctaaaattagtattgacttctacttgtactacacaaagtttgacaagtcaaaacgtgagtacaaccacaaacacatttaagagaccacatgataacaagaacatcacaataaatacgaaaccattttctctaagttttgtcccaaacaaaaaatttcagaaacttatcatataatggatcatggtaacatgccaccatcatcaccatcatcaatggtaaatcataccaattccaacatgatcatgatgcatatgactttcttctggggaaagaacacggagatactcttctccggctggcccgggacaagtctcggcatgtacgttctatgtctcatcgtcgtcttcctccttgctgttatcgtcgagtggcttgcccattcttcgatccttcgtggacgtggctccactagccgcgccaaggggctcgttcagaccgcagtctacacactcaagacaggccttgcttatctcgtgatgctcgccgttatgtcctttaacggtggagttttcattgtcgctatcgccggattcgccgtgggtttcatgctcttcggaagcactgctttcaagaacccctctgatgacgagaaacccttcgaacaactatgatcactctttattttacttggaaagaacatttcgtttgtgtgtatttaatttgcgtttctttgaattttgatattttgtgactagaatttggaattttatgaagaatatagccatttttgcattttattgtagatgatgtagtcatgtagatgataaatttcaaccacaaattaaataacaaacgccgtccatcactcgattagttctctacgagataaggtgaactttttattgatcaacaaaacacatatatcgttgtatgtacccaaaaaaatttataagaaagtaaaagaaaaacacacgaagacaagaagagctaaaatatattaaacttcattgtatagatatctaagacaaacttaatccatatgtgatattcacccttttggtttcgtagatataaatccataacaatttaaattcatgtgtgacagtcaacattttgtttattccatatattagttcacaatataccatcatctgtttcttcatcaagacttaaaagattagacgaagaataagaagaagaaaccatttgtgactattaatttcatgactatccatgtcatttttggaacttccttcaatattttatttattttgtgtgtcaaaaggatcttcatcgtaaaaagaaaagacaaaacaaaacgggtgctgtaatgatgttgaacgtttaaagcctaacatcaaaactcacaaggatctctgtttatcaagaaggcttctttattgaatgcatctcccaaaacatctaacatcaaaacaatggattcgcatgcttcgaacctttctcacttagaagttcacataacaaaatatgactggctcacaaaaagtgtaagtccacttatatgttctacaccaatcgagctcatcctaaacggttataatatccgtagagttggtttaatttttgtttggttattccatgggaaaataaattacaaagttaaaaattgccaatattcagtcattaaaacatgaaagaggataactaagcaaagttcgcaatctacttatcatctatttcttctacactatcatgtcatttttggaacttacatcaaagaattttcaattaaaaaaacaaaaaaaaaaaaacagtttggttacaaacttgtaactaaactaatgacaattataaaatcatcaaatagttaaccatagttcctagctataataatggtaattaaagtcccaaattgggcaagacaattcctgaaaggcagaagagggaagatgagatcatcttaagagcaccaactagttgccatgattttaaactaaaatctttgaatcatggtgcttctcaaaacaaaatcttaacttacataaataagaataagtaaatataaaatgaaaagccctaaaaacttataacttcaggatggacatgaagctatcataatgatctgaaaccgtcatagtaaggttactgaattccttatgagtggaaataggcagtccttcgatcatgacatttttgatacgttccatcttcaagttgtaaaagaaaagacaaaacggatcagatagtttttttgaaacgagacaaatttcgccggcacagaataacaaatagagcaatgaggcattttcaaacttttagccaacaagctttgatatgactttataactggcatcgcagcaccttatcgagtaatgcagttcatatttacacctttcttttacacaaaaccaatcccactccctttctcatcatccacacaaagtagccggtaaagcaaaaaagctcttatacacaaagaaagcaagaattgtcccaaaagaaaactctcatacatcactttgctgtttctttcttaacttcgttattcgtccagactacttgctccagagaattagagagcttcttatagaactgcaaacaaaccatcatctctgcttagctcataaaccagttaattaccctatcatatagtcgaaaccaagctatttgacttaccttgtgaaattcgagagtgtctcctttcgacttcgatacttgaaccatatgaagacttggcgctacttggaatatctgcttgttgtcacaccatacaaacaaaaaacacactgattcaataaaccatcaccaacactttcttgaatgtccagtctcatataacatacctctgtcgctacattgagattcccctttcttccagccttcacattctcaagcctcatctgatttcaagtaatgtactacgacgtctttagttattgattcttttcatttcatttcatttccgttacagagttttcactaaccttgtagttcttcttttgaacatcgaaaccgagaggctttgcagcttcttctatcttctcgatgatctcattcgcgcctcctctcaatgttatccttgtttccctcttaaattcctgttttcaaaataaaatattccgatctcagaatatggagacaggagagccagtcttttataggaacagaacacaaacctgttctggatcaaacagattctctaggttaagtccccttgacattgaaatgatctcgaaggcattgatcgccgctggctgttcttctctcttctcagtaacaagatgttcctgtatatgatcatcacatgcgttatgtgatgctcttgttaagaaaaaatgaaaaagaagaagaaaaactatccacacctcagagtccttgaaaacagcatcaatatcgtccatgtttgaatcatccctctcctcgaaaacaggtggcttgtaatctttcttgaaccattcatcttcgaaaacctcttgcggtgttacacgctgacacaaaaccaaatcaactcagtttcttcaaattgcataggaaacaaacaatctaaataatagtgagtgtttaggatcctcattctccggtaatcaaaagacatgtttattcgattagtatgcttaaccaagaactagtggttgatttttgccaaaaacaagggaacaatcagaaactgtgcaatgaaatgagagatgaagcagatagagttgtacatgttattatgcataacacaggttcctcaactttttttctccagcccttttgtgctggaaaaatggaaaacatggttgagtagtacaataaatcatggtgcaaaggaaggaatatagagctcattactcaactctcaagggtttttaaaagccataaagttcatgtttgtgtgaaaattcttagcaatggacagcttttcgctccaacagttgtggacaagtaaatgccttttatttagaggggtatatgagcatgtaaaaattacttacagtcatcggattcggatctaagattctagtgatgagtttcatggcaccgagtgagagccacggaggacagttgaattcaccagatgatatctgcaccaaaccacaaaaatgccgaaagggagttataaaaatcctaaaacaagcattgctggaagattccatctaaaagagagaattttagaaaagagttgctcacttttttataaagattcattagattagaatcatcaaaaggtaagtaacctgcaagcaggacatagagtacaacaccgcatgaccacatgtcagctgttgctccatcatagcctctatcattgagaacctaaaacccgcaaagatgtcggttataaagacgtaaaatgaaaggataatattataagatataaagaaatcatgtttgttttaggcagacctcaggagcaacgtagtttggtgttccacacgatgtatgcaagagtccatcatcctgatatccccaagcatataaaccatgtttaagaatagatatatgtatataatttttgacaacaaaatccgtaagttcttaggaaaaatgaaaccacttcttggaacagtaaaatacttatggaaacagatggtcattaccctgacttgttgggacaaagcacttaatccaaaatctgagatcttgaggtttccataggagtccaatagtaaattttcaggctgcaaaatcacattacaatagtcaattactggcttactgcacataatatatgcataggtaacttctctatcaatataccatgtttcagtcctaccatctataaaaacaatgtatgtaccttgaggtctctatggtagacccctctgctatgacagtagtccacagcatgtataagctgttggaaatatctccgcgcctcatcttctttcatccgcccatcatttaccttcattcataagttatcactatcagatttcacaactataatgtgacatcacagaatcacaaccatttataattgtggtaactaacttacaatcttatcaaagagttctcctcctgtaacatactccaagatgataaatattttcgtcttacttgccatcacctgcaacaacaacaaccagtacaatttcgaagtaagtaatttccaagtacatagtacataatcaaataacacatttatctaaagaagtgttaattacctcatataattgaacaacatttggatgttttatcaacttcatagtagctatctctcttctaatctgtaaaattcaacaaaaaaacacaagcaagatcaaaatcaaccgataaaaaaccgcaatgcgaaagcagagtatccataattcaataataacaaaaacctgttcagccattttatgcttgagaactttctctttatcaagaatcttgagagcaacaggttctccagtttcagagtttctagcaaacttaactttagcaaacgttccttctccaattgttcttccaacttcatatttacctactctacgtttcacttgctgtctccgattcatttctctaaccacaccacaaacaaatatcactccttcagaaaacttagaacaaagaacgaaactttagaggatttgattggaaacaagaaaagggtaaagaagaagcaagacagagaatatctcaatcttatatatatatatatatatatatatatatatatatatatattacttatttaaaaagcaaaaaagaaccttaattttttgttggggatcaacataagagaagatctgatagctacagagagattgagtgagaaagagagagatttaaaatggcttttgagagagacgaagagacagaggtcgtgataaacgatgaagaagaagaagaagatttattttgattattaaatttttgttggaaaaattcgtttttggtgagaagttacagttttgctttaaggagtttcagtagcagacaaagatccttagaacagaaagaaacaaaaattaattgctgtctttggtctttttttgagttttgtaacttgtaaccactaaaaaaaaaaaaaaaaaaaaaggcacagtaaccgatttcaaagttttaagatgatgaactcaattcggatctgttttctcttttcttttcttttattttattttgatattaaatttctttttttaatgttgaattatttttgccaaacaattctgaaataataatgattaaaaatgataatattagttttttttaatggatcaaagaattggggcgaattttgttgtgactagtgaagattttgtttttttgtttttgtgatgaatgtttgtttattgacttactgatagtgacaataactaacaagatttttcgatttaagtaattttgtcttccacaaaagattgaacatgtaaaagatactaatctgttgtaaaaaaaaaaggacaatactaggatctaatctagatggtataccaccagataagtttgtatttttatatataataatgttcaatttttatatggacaaacacattttatgcagcttcgctttaacagtctcaacttgactgacatttgatatatgagagttatagtgcagagtttactttgagttgaatggttattataaaatttaatcagtggcaactggcccactggccagtgtgtaacaacaagcaaagatccagaaagattgacaaattaaaagctaattaaattattcgaacctaattttcttgttcagatttgtttcacttttaatattcatagtcgtaaccttactcgaaaaagacatccacgttatttgtaagagttccggtgcatatcacccatcgcttgcaattactatctagttgctgcaaagttaagaaatcaattttaaaaatgagaatgaagaaaagtttcaaatcctttttcttggcattgaagtggtttataaactccatcaaatccagctatgtgaagagaaacagataatccacaaagaatcaacgccaaatcacaaaatctatccaaaagagaggtttccaagttaacagactcggctggtgatatttgaagaaagagacttgagctgtgagttccatttatcaaccgccttatgcaacttccttccattgccactgtcgcctctcagtaagtaacggttcatttcatcaatgtgaccatcgattctgctgtcgagtatcagcgacactagtaactccgtcacatccgtctctggcacgttcagttcctttgatatgaacggaatccctatctttgtgtatggcttaatcagcttcagtaacacttgtgttctcactttcttcagcagatcttccatgtagtttctgatgaatggatcatccattatcgtcctccggttactctacattccaaaaaccattccatgagtgtcgttttcatatataatgagttgaaaaaacaacccaataatacttcactttttacctttagtattctctcaaactctatgatctcatttcgttgatatgctgcgatcaaatttgtcattgccaaaatctcagggtcgtttttgtacctgcagagagccaactatgaagcaacgaaccaaaacgagtgttcaacaaaaaatatatacggaaatgacttacggctttgcctcttggccatcaaacggattcacttctgactccatcagcatattcgccagaacaagatacctttgcatagccaaaagaaaaaaaaaacaaagatcattaactctaacatgtttggaccgatcacagaaagttactggacaagagtaatcgaataatgctcatatgcacctaaaaccatgtcccaagtcaaatctaaataatatgctttgctttaatcatccattacatcttttatatttacttttataccatgttaataatcaagtgaccagagggtatcaaataagaaaggataaagagatgagaagatcataggaaacatacttcaggcactgtatacgtctttggttgccagcttcatcgtaatttttaaaagcctcaaagaagtctgtcgctgcttcttcccactgacgttctgccatgtgcatttttccaccacactcgcggattatacccatgatcctaggatgaggtatggcagacttgatggcaagtgccttatggtatagttgctgcatccattcaagagtgttgttgagtctcagtcacaaaagccagaagaaagtatgcagcaataaaattgcagaatctcaaaattgtaagaaaccatgtagcttatgacatttaccttaagctttttgttgtccttcgtttcagtgtaaatctgaatttcaattgcataaacctcaagcagctgacttcctttcttctgatcatcagttccatcttccttttgacaagacttatggagttccttcagaatctggcaagcaataatagatgttattgtccatactaggatcactaaacataatcagcgtcagtcaaaagatttgattaaacaacattataccttagtcatccgtctgtattcaccaatgtcaaaccagatgttgcagagtttaagatttgtcttgaaccagagtctctgtgaaagaaaaaaatatgttcacaacaccaaacgattgagaaggaatcagtagcttatacaaaacgaatgaatagcttctaaacctcattcttagcctcttcaagggctttcaaagtggtctgatagaactcttgcagcaggccagtgttctggctagcagatccagagacgaaatccatgatattgtttatacatttttcgctgtaattcctggtgactgctgacttgatatatgtaagcatctctgtataggcttccatcatttctttgtatttacctagacgataatagatcttcacagtctgcttaagagctttgaaacccctgacaagaaaataggccattgaatggtttaacaaaacttcaaacagactttcacacatactacggatagacagaatagtagaggcaatgaatcttctttaggaatactgatgttttgtgtgagatacaaagaaaaaacagcctaaaggtacaaaaattaacttgagataaaccaggaaaaaagccggagatcataactaaagagaagggtcaaatccgaatgcacacacagcccacgttcaacaatcaacatggtcaagaactatatttgactgcaactaaacaagctatattacatgataatttataaacagactacaggaataaaactaactttacatagacaaggaaaatcttgcaggtaacctagagatctacaattcctatctcttccatcaacattacattcaaaaccacaaatccagtactcctctacttgaacaataatcacagaaactattcaacggtcttaccagtcagctttctcaggttccatctgaacaacctcagcaaatccagaaagtgcttcttcaggttcagtctcaaccataccttaaagaaggaaaccactaggagtcaagatttataatcgcagcacaagtttgagaatgcaaacacaatagaacgtaagaaaaaactaacctttagagttataatactggttctcaatgtcaacatcttgttcctcttgctcctcatcagaatactcgaatccatagtcctccatgtcagcatctacacaaaaatcgaaaacccaaatcaataaaacactatcgattcgtaacaaagtaagtagtcgaattcgggaactttcgaaccctagattgtttcagagtagaagattagacatagcaaaacaagaacaagacctgaagccatgtcgattcgatgaagaagaacaccaaacgatacgtggattagggcagagaaagaacgattagagaattttgcttctctttctcaaagggtttttgcggaagtagaagaagaagagaagaagaagagaagaagaaggtggaagaagtaagatttgttgctggatttgtgaaatattactattgggccgagtaggtaagagataataatagtccgatcagatatatatgtatatatacatatacagtatatatatatatatatacacatataatatgaatcaaaatatttttttaactttaaaataaattatatcatggatatggtaaaaaaagaaattattagttataaatttgcaatcatttaatttttaagcaaaatagaaatttttaattgattgagatttgaagaaatttatatggtatagataataaataaaatggaaattaagttagagatagaccttttcaaaattgagaacaaaatcagaaatttgtcttaaaaaggaggatttaaaattttaatagccttatatgatataaaataatgaaaacctaataaacattttataagttttttctcttaataattttattaaaagaaagataagaaatttgaaaatgaattgctcacataaattctgtaaaaatgatgcaagaaaaaaaaaactgtaaaagaatagaagaagctgcaatctaaagtttgtggcgaagacacaattataatttataaaccactttagccgctcgtagagaaccagcgtggttgcattcccggattgaggaggaaaagcgttgagattgatggggggtaatgcatgtttggtgttgtttggctaggagcgtgtgtgctctgcttttaaatcttaaaagtaaagcaagcatttttcattttcgttattcttaagaaaataaaattatgaaccatacaaaaggtttaagtttcatacaatattaaagtggacataaggccaaattgacctaaaccaaaggtaaccaataaactggtgaagatgtgaaacgatgagattaagaaaaaacaacacaaagtcaagaagtagattgcctactttgaagttaatggggttacacttcgaggaacaagagtgcacttaagaggatgagccatgctcaacgttcctttaccagcaacctcattcatgttgatcttatgtccgtcgatcttccaatcaaagcattgcaccatcactccaatagcggtttctacagacacataagctagattcactccaggacatcctctccttccgcttccgaatgaaagatattttagaacttcttcttttattgcgtctttttggcttgatcttgaagaagctagaaacctctctggtttaaactccagtggatcttcccagttatcaggatctctcattatagcataaccattaacaacaagttttgtcttcttaggtatagaaaagcctccgatcgtacacccgtcttgaaacgtcctcaacacaagagggatcgtagggtgcaatcttagcccttctttgacagttgcttgcaagtaaaggagattcggtagatcagtttcttgaatcaaccttgttttccctacaacagaatcaatttcttctctcaatctctcaagaatcaaagagttgttcatgatctcggccatggtccactctatagtgtgtgttgcggtgtcagtacctgcaaagaaaagatcctgtagtatcaaacgtttcttagtcaagaaaaaccattggtgttcgctaaatttgttataagagatgaatatttaccacaaacaaggacttgatatggtctctagtgatcttatactcggaagttttgtctccataaacttctaagagcttatccattatgtcagtaccttgttgattctcctcaagtctctcttcgttttccacaagaatcttctctaacacctcgtcaaacttgagagaaatatccatgaacacctttttaaacagtgtgatcccaatcttcttaagtggtttccgcaagatggccgccagcaaaaacttcttcaacaaggcatctgacttggtcaccaagcctctaattctctctgcttcaccattttcttctgaacaggtcctccccataatcatcttgcagattatgttgttgactagcttcatagcttcatcagcaatctcaacactttctttcttcatcgccttatctaataggtttgagtaaaacctctctacttcatttgcacggatgcgttgtgacctctcgagtgcttgaggcccgaggagctttgtgacgatgagcttcttcatgaacttccagtattctccgtaaggtgcggtaatgaagctaaatgatccgaggaagagagacccctcattcgtagggaagtcgcgagtggaaacgtttacgtcttgtgccctaaagatctcataggctattgagggagaggagacaaggagtatgggaacattgaagacgtgaagatagaggagaggtccatacttggaggagagtttttgcaaagatctgtgcataaaaagagagaggagatgatgaagatggccaatgatcggtagagagggagggctcggtggcaaattgaaaccatcctttggtttcttgaagaagaaagagtaacagaggattgaaaggaggcagaggaggattaagatcaaacagtttacaaagtcaacgttcattatctctcccattgtttgttgctcaaagtgaagaaaatcagatgaatttaaatatcaagaatccttgaataatcttttatatataaattagaacacccatgaatataatatgaaaatgcttgattaattatttacctaaataaattgtttttttggaagaacgtggtataacaacagacagatggaatctttccttttgaataatatagatagtaatcaatacataagttttttactatatagtatatacactcatgataaatcattaatttagtaactttgaaaaccgtgtgacccttaaatacgtcaattagtatttgatatgatttggatattcaattacccaactaacataaagactataaagaccatagaagatctcatctttgaccattgcatgttaaccagaataaccataataaatggctggaaaatttaactctgcgaggctatgtcggttcaggtattccattttagtaaaaatcggttgaatgggtagaatcttcgagtttggtattttgttttaacctttaaaaagtatttcttattttctgaaaactacgtctttttaaaaactagacatagaccaaaaaataacgtaagtctctaaattgtgaattatgattaattttctaattgttttcgttgcttcttctatctcatattcctactttcaaaatgaacgatatctttttgtggaaaagtttaaagattaaatatgaaaaaacattcagcagaagtcttgtctttacttgtgaatgtgagtagtctgcttggaagaaacttcactctagaatagactcgactcactcttttaccactgaaagttatagaggatatacaacacaatgattgtatttggaaagcgccttcattcattaaatccaaatgatcaattccatcaaccatgttaacttatttgatcctctaagttaaatgtgaagctaattagaatttgcttcaaacaagttgaattgagcaatacgaaatggacgacgatcactagtaaaacaatactaaatgtacttgaaagaaggaaattatgaaccatacgaaatgtttcaagttttattcaacaaaccagagataaagcaaaccgaactaaatcaaaggtagccaattaaccaggagattaaaaacaaaggcagaatgtcaagaactaggaatctgtacagttgaagtaacagggattagggttcgaggaacaagagtgcagttaagaggatgagccatggtcaacgttatttttccaggagcctcatccatgttgatcttatctcctttgatctcccagtcaaagcactgaaccatcactccaatcgcggttcctacagagatataagctaggttagctcctggacaggctcttcttccattcccgaaaggaaggtattttaggagttcgtctcttatctcatcattttggcttgatcttgaagaagctagaaatctctctggcttaaattcttgaggatcttcccagtattcaggatctctcatcatagcatacccattaacaacaagtgttgtcttctccggaacataaaagcctccaatcgtacacccttctttaaacgttcttaacacaagaggaaccggagggtgcaaccttagcccttctttgacggttgcttgcaagcacgggaggttcggtagatcagtttcttgaatcaaccttgtttttcctacaacagaatcaatttcttctctcaatctctcaagaatgtacgagttgttaatgatctcggccataatccattgtatagcgtgcgtccaggtgtcagtgcctgcaaagaaaagatcctgcagtatcaaacgtttcttagtcaagacaaactaatggtgttcgctaaatttctcataagagatgaatatttaccacaaacaaggacttgatatggtctctagtgatcttatactctgctttttcgtctccataaacttctaagagcttatccatcatgtcagtaccttgatgatgctcttcaactttctctttatattctacaagaatcttctccaacacctcgttgaacttgcaggaagcatccattaactcctttttgaacagtgagatcccaatcttctgaagcggtttccgcaagatgcctgccaagataaacttcttcgtcaaggcatctgtcttggtcaccaagcctctgactctctctgcttcaccgttttcctctgaacaactcctccccataatcatctggcaaacggtattgttgaccagcttcatagcttcctcagcaatctcaacgctctccttcttcaccgccttatctaataggtttaagtaataactcctctgcacggactttttgtgacctctcgagtgcttgaggcccgaggaacttggtgacaatgagcttcttcatgaacttccagtattctccgtacggtgcggtgccgaagccaaaggatccgaagaggagagacccttcgttcgtaggaaagtcgcgcgaggaaacgtttacgtcttgtgtcctaaagatctcataggctattgagggagacgagacaaggagtatgggaacattgaagacgtgaagatagaggagaggtccatacttggaggagagtttttgcaaagatctgtgcataaaaagagagaggagatgatgaagatggccaatgatcggtagagagggagggctcggtggcaaattgaaaccatcctttggtttcttgaagaagaaagagtaacagaggaaggaaaggaggcagaggaggattaagatcaaacagttttgaaagtcaacgttcattattgcttccattgttgctcaaagtgaaaaaacagatgtatatagcaagagcccatgaataattgaatataatatgatgacatgcttcatttcttacgtaaacacaattgtttatctttccggaagaagtgggatagtagatagatggaatcttttcttttcagtagtattaaatccaaatcatattcagatccagctaagaagttttttactattcaaacactcactcatgagtctctctactatgaaattgatatctatctgaatttgcaaatgattttgcattataaatacagattctcggtttagtttagtttttgctactgctagtatatatctgtttcacacagtaaaacgaatcatgactttctactatgaaattgacatataatgattatagattaggtaggtcaagagtattcgagaagtgagtaaatttttaaatgttgtttgtatagttattcatgtggtcacttttaatggatgttaattctagtgaaggagtcatcgtagcaactgttgatagcaataagataaaagactccaatggttcatgcgaaactgcaacaactgtccctccagacaaaattcaattcagagtacataagaaacatcaaacgacgcaataagacggatctaaattcaacacactcctcagttttagtcagcatccatctcctcgagcgcagttttagctgccgtctttgcttcttccagaagatcatcagggacctatacgacgagtccaatttatatatggtttatgaatatctccttaaatcatccttcataagcaagcacttataaaattttaccttctgatgctctcgttttgactcctcgcatatccagctcatctccaattcaaaagccttgtccttggcttcatcgtgtagcttgtagatgctgcacatgaaaaagtaacatcacatcttgctataaaatgaacctggttatagaaagcacatgagaaccagaaaacatgtacatgagaagcaagcactactcacattttcgccacctcgataacgccttctttgcatgtcatctcagataaatttaatttctcaatttccctgcaagaaatcctctgatccatcagaacacttgcatacccttgcctttttgataactaaatctataaccgtttagttgaaactagttccacacatgtcaaaggcggccaaaaggtatgcaatccagaaacatctgtcataaagttcttaataacatttatggagaatcatcaatcctatcaaccatgaaagctcacttgatccttcaagtttaaatgatttctttgatttaactgttaagttagttagaatttccttcggacaagttaaattgatcaatcctagtggtactacatagtatatacccttagtgactacgcatatccactataagagaatcctagaaaatactagtatgataccaaatacattcacgatgtagcttacgttttggcagcttgctttcctttgccaatggccgcaccaaagtatctctgcaggaatagaattcatatgatgacagggaaaaataacgtaaaatttcatacttaaagacacatatctacgggcagaaataacttacatatgatatgcctgatggttcaatcatgtacaattgaggtccatctctatcataacctccaagaataaccccacagccaaaaggcctacaaaataaaaaccattttcttataattcattcaagtaggagaaatgcgtaggtgactaccaaagacgtagatgaattggacaaacctgagccaccaatacagggtacacagatgtacataacttgcaacacgctcagaaagttccttcacaggtacagcatcgccataaacactaaattatcacaagtgaaggtagagttggttacacagtcggaaaaagttatgcaaagccatgtaggaagaaaggagaacatacacattgacatcttatacccatatatttagatttttaatctaacaaaatgcagataaaaaatattttgaacgtttaactaagagaaacatccccttgagaaaagctttaggagttgaacagttctttcataataataaatcttagatataagctactgatgttttcattgatacctctcatagcttcgtgcttcagacttagcacgcgcaacaatttgcctcccatcagctgcaagcccagcaacagcctgacatgacagaagtagaaatacccataatcatgaaacaaaacaatatactacgagactagacacaatagtagttacaaaaaacttgaaagatacatatcctcagcagaaactaatttcctatagtttaggagaaaaaaacataccatgccagcatgacgatgaacagaatggattctcctgttggaacctggtagcatcatctttgatgcaataagtttctcaactccctaaaaaccaccaaatgataaacacttagcaagaccattcctttatcaaaaatctgcgtaaaatcttacaaaacccaaaactaacaacagattcacaacatatcgaacaggaaatgaaactaagggactgtaaaatgtgtcatcttgggtcaaaatttacacggtatatattacatcaaatctacaattctgataacaaaaatgtgaatacttcattccaaggttaaatcacagcacgagagactaaacccactgaagaaagtgacaaagtagtataaaaatcaatagaggaaggaggaagaatcaaaccataacaatcccatctttgcacttgattccaacaacagtcctgcgaagaaaaaaaaagggaaagacttttaacaaaccctaattcgtgtcgataaccaaaatctcaaagttttcagaagctaaatccgatctactaaagggcgaagatcgaagaagataaagccaactaacccactgttgtcgacagctttagcggcgtactcgatctggaaaacacggccatcgggagagaaagtggtgacggagagatcgtacccagttccaatgctactcatcttccttgattttttttttctctgactcttttctgatttcttcttcgtcgagtgatttaagctgagatcgaagaaaggggttttctttgttctcaagccagagacaagccaaatctttggagctccgtctgactccgggttggatattaaaacgattcgggttgttttgtcgggtgggtcgattcggttattaacgggctttattaatattatgatttggcccattctttggtaatcttttaacggtatcgtgaatatttttaagtgattttcctcttttgtataattttgaataatcaaccacatgaggaagaaagaaatatttctcttactcaacaaaatatatgatcatacaacacttctttatgaactcactagaggtaagactataatatgctctagcattgggacacacaaactttgggatgctcaacattacatgtttttaaaaccaagacagtaaattacctataattgtgatggatacaataagtttgttttttactacatctctagccaaactgagagacatagttgtggcgatcaaaaaagtatgacagttttgcgaaaactggatcttgtttaatatcaaatctttaagtgaaggtcatgatgcttaactacccattaggtgacccttccaacaacaaagtagtgatttttgtcctaactcctagatgattattaattacaaaaacagtaaataaaaagtactactatttctaaattttcttataatgctaaaactttttctttggttaacttaattaaaaagtagtttaaaatccatggtaaacacaaagctaaaccttttttaccgttttatatcactagtaatcccattctaccaactcgttgaatacttagtattggtacgcatggtaagatcagtaacttatatgaactaaaccattcaaagcatgtaaatggttgtcggcaaaacaacaatactatttcttttcacaagggaatatatacatcacctccctcttaagtaaagctagtcgaattgaaaacacaataaggcccagtggagaacaaaacaaaagaagaataaaaaagagaatcagattcgaaattattgttattgggcctaatgggccttttctttttccttctttataattccacacaacaatcctctcattacacacaccaacgttgattcttcttcttcttcttcttctctctttctcatctaaaccaaaaaatggcagatcagctcaccgatgatcagatctctgagttcaaggaagcttttagccttttcgacaaagacggagatggttcttctctctcagatctttcctcttttgtataattttcattcataatagactcacttgcgttttttttggtgttttgagtatcacttagtcttggctttaggaatttgatgctcttcgttgtccataaaatctctggatattcacattaacattaaacgcgagatttgatgatatctttatcgttcgttgattataaattataatcgcaatcggatctatctcgataataatctctaacttaatcgtgttttagtcttccagattttactaattgtgattagaattgacacaaatcttagaattcaataatcgaagtagattacattgacatttgtagattttttgtttaattgattcagttatttgagtaggttacaatgaaatttgaagattttgtgttcatttgatacagttgttagagtaactaaaatgaaatttgaagattttgtgtgttattagagtaaattacaatgaaaatttgaagatttggtgttaaaatctgttactgatttgagagaaatgtgtggttttgtgtttaggttgcatcacaacgaaagagctaggaacagtgatgagatcattaggtcaaaatccaacagaagcagagttacaagatatgataaacgaagtagatgctgatggtaacggaaccatagacttccctgagtttctgaacctaatggctaggaagatgaaggacactgactctgaagaagagctcaaagaagctttcagggttttcgataaggaccagaacggtttcatctcggcagctgagttaagacatgtaatgacaaatcttggtgagaagttaactgatgaagaagttgatgagatgatcaaagaagctgatgttgatggagatggtcagatcaattatgaagagtttgtcaaagttatgatggcaaagtgaggaaactattctcatatcttttctctctttttctttctttctttttttgaattgaacaactctgattattgctttattctatgtttgactgttcattattatgcattcgtcccaaatttcatgttatgaactattttgtgactttgggttaaattatttgtttggaagtttttagtttattttatattatgtgaagtaccattgtaatggtcgttgaaaaagctatctcttggtattagtacttttttattttattgtattttatagtttgcaatgtttgttaaaaaaaaaaagggttatttgtgtgattaaaatttgtaggaaaaatgtctgaaaacattatatcggtagttttaaaagcttagaattttttatttatttttaaattgttggtcaatttggaaattcccctattttttagaggaatgttggcaataatccatataatttgagtcaaattaaaatatgtttttcttattttacggttcatataagaaaataagtaaactgttagaaaaaagtattatcatttgtaacgattaaaacaagagataaaatttaggaaatacgaaaaagggttaaagaaaaacataacttccatttcattttttctttcaaaagttttcaagcttcagttctctttttccccacttcaactttcagctttgtaaataacattcgtgtttttcttgattcaatatattctacattttaacaaaaacatataaaaagtggtgtatgcatacagtagttattcgtgaggtagaacgtaattgtttaaattaaaaggcagatatgttttggggaataaaatcaaaaatggatggtaagtagcaaaagctagatagatgaaatgagaatctccaaacctttaattatgactgaacttttttgttggtaaccagtattttttatttttacttttttttgttacaaggcttagtttcttctttttcttttaaatattatcgaaaatcttgatacctaattattttaaaatgtgtgtaatttattaggagaagagggaagagagttatggcagcaaagcgtagtagcaattctgctgaatacaaagaaaagaatggtcgccggaaaagtcactgccgtattctctgagctccgaccatttgcttcttaattccttttctttatatgtttgtgtgcaataagagatttgtacctctcacacccattaaacggattttaaatgtcatatcttgtttgaatatgttaaatatttactatactgttatataaaaagttttaaagtactatcaatatagtaagttcatttaggcatttcctatctaccacaatgtttaattttcgtctacaacatacgcacacttatcaaacttgaatccaagtatatagcgacaacactaaatccgagttatgatacgacggtggcactagtacagaaacactatcacaatgtttttaagatattagcaagagaaaactcagaaaagatacacgaccaatattaggagactttaactaatactctggcgatctaactgttataatttatcagttgatttaggcgttaggcatttgctatctatcaacaatgtgggcgggcatatggtctaattcttgtgagatgataatacaattaaaacaaagaaaatacttttttaggaactaaacctaaacttaaaagtctttctaatcagttgctatttaagtattttcataataaatcaagaaatgcaaattgtacatgaattcgaaaagcctctcgttaagaaaacttatgattaagaatataatatccaaatactagtttataacaccaaatgcattgaaacactttgtgtcacttagcatcaaacattaaacacttataccaatttgaatttaacatggcaacaaccgatatcggaaaacaaaatccatcgcgtatattaatcggttgaatattttggtcagatgcaactaattgttccctttctctatgatacttcaatttgtatgggacaaaatggaaatcttatggataagaaacaaaagaaaaaagagttgtgtgaagaaaggtcatgcatatacattaagtgaagctttaggattcatgcaaaacgctttagtaacatatttcttcattttgtataagatttaacaagtaaaattctattcaaaaattctagtaattaaatgatttatagataggggattaacagtaaaaatacatctaacaatatttaatctaaaatggcaatagtatttaatctaaaatggctaggaatagcatccattgctttttgagaattttcctcttatgcaagtaatcctttcctttctctacaatatttttcattccatagttcataattagaaaaagctccaatgataagggacaaaatggaatatttatagacaaaaaataatagaaaagttctttgaatggccaataaattaaaggagtaatataaaaaaaaatgcgtataggaaaagcaacaaagatgtgtgtgaaaaaatctcatgcatttacaatgaagttgaagcattagcgttcatgcaaaaatgttatgctcattggctataaatatatatcttcaagaaaacaaaataaacaaaagagagaataacaaacaaacaaaaaagagatgatggggaaatatttatgggcgttagtatatgtaacggtgatgatattaattatagtagttgaagtggaatcaagtcttcatagagtaggcggaggaagatacacttggaactccgatgtcaacttctccgattgggccaaccatcaacgtttctactccggcgactggctttgttagtaaaatttcttctttctgttttttttacacactttcttctttgttaatccttttttttactaacacatgtttctaaaatgggcagatttcgggttcaatcgaacgcgtcacaatatccttcaagttaacaagagtagctacgagcaatgcgttgacaacgattacatattcaacataacacgaggaggacgagatgtttttcaactccttgaaccaaagccttattatttcatttgtggtagaggttattgtctcaaaggtatgaagcttgcaatcactgtccttcctcaaccgccaccatcagctccaaccaatttcacctcaaccaccactcctctcataccaccaaatgctatcactgcagccattctcattttcgcctttaaagctttactactttgactatgcttatctcgtttgtttattgagttgggttcaatgtatgaactattaaagtttgagacacattcccaaacttcaaaagttttcacttcaataagtcgtttgtttgttgttttggaactattgtgacgtcctaaacttcagaaatatccactacaacaagtcgtgaactcttaactttgactaggttctgtcatttgttttggtttcagtttttaatcatgagcactacacaaaaggctttgctttgtctaggttatgtatgtagtctgtttccaatgcaagaacgatttagacaaaagggtaacttcctgaacttagatattcactacaataagtctttaattaaacaaccgaattgttaagggggacaaaagcatattcaaaccccaacaggcaaacaaggctggcgataatagtcacaaaaaacattccaagccttagtgtcgatgcctggcttcaaggccgagagagatcctaagctgaaagtcagatagcctattgaactactacttacttactgagccaagtagggctgctcatttaacagaagaacatggagttggcgacgttgtctttgagtcttgggagctgtgcaacagagattggtcctggagctgtgataccaccatggcttgatgatgtctcagactgatcttcaaacttcatgaacgtcccaagctgagcagctgccaagtgagcatagcagatcggcgcaactgcacaaaaaattaaaatgtcagttattaagagaacaaatgaagacgactttaaatcgatggagtagagaaaacagttatggtaattaccaacagaaatggcactggtgcttctttggtacctggaattttgccaaagaaagaaatcagataatttctgttatcatcacaatcgaagttgtcacaaaaaatgtaatgaaggttgaataagagactacatacacataggagagcgagtggacaagttcctgaagttcgtcagctgaaaaaccaatctcatcatacaggacgtggtagtgagttgggcgggtagttccctaattcagaacataaagagtattaaaacgattcagaggagcaaacattaacaaataaagttttgagttgatagatgaaacttacaatcattccagcgtgagcacagaggtagaaatcattgttctttgggtgacatattttgttgtcaatgattgtccctgcaaaataaccaaaacccccatgagatagagatcagctatgtgtcaaaaaaggttataatatagatttgtcaatcacctggaggaacattttcaggagacgttggctggaagaacttggtatgatgattcttttgagccaccaacaaaaggaactttgggttccaatttgcgtctaagagcttgcaagcctgaggaaagagaaatgcaattaagtactaacagaagaagaaaattacactgagaaacttttattttgaagtttcaactacctcgatgatctgatcaagttcaatattcagaacctgattgaattgagattcactcacaccatccctagaagcattaaacatcgaaacaaccaatatgagaaaataaagatgggaaaaatgaagagacaaaagctctgatgtaacatacctgaaaattatgatatgctctggttttctcttattcgagctggtgtagaaatctaccagcaactccctgcaatcaacaaataaagttacatagatacttaaaccagacttcatgcaaagattaaacaaaagccacatcaagagttagtgtaagtgcacacttgataatgccatcgtcttcagttccatttttcttgacaagggactcaatcatctcagccttagaaggctgtgtccgaacagatgctctatatttggatatcagtggccactccctagaactcaccacctaagttaatcataacaaaagagacaactaaatatcagtcttgaagaactagccaaactaaaaagcaaacaacagcagtgagtaaacattttacagcagcgatggacgggacatcagactgtccaggagatccatgtgaaacatccatcccaaggataatggttggaaccttagaaatcacagtgaacgcaggtgtacgctctacacttaacattgagttcaggcctccaagctgtagttatatgttatcagagattgcacacaagaagcaaaaaccatttccaaaagagaaaaaaggagagagatcacctttgcattaatcttcagaagtaagttagtaagatactgatcattaggttgccgcgttggagccatgcattgagtaacaatgccaaattcagttaagttttttttcttccatggacctgatgaaggattcaaagtatttatccaaggaaacttctattatataaaacaaaaagatgattgaagactggatttaagagatatctaaccatagagatcactgttctttttgtcagggagcacacatagtatgaattgtgggacaccagggagtttcgattggatgtccttaaacatgttctcaacacgaatcataggaggagcacggcggaattgattaccctcctcaaacacttgaaagggagaagcaatttcctgggacagaatacagaaagaagcagtatctaaattgttgataatcacaaacaagttttcaagaatactaaaaacaaaagaagagaatcctgcttacaattccttttgatcctccaatttttatcagatcatcaacaacttgacgtacattacagcgagcagagaaattgacaacaacccatcgttgaattttggtgggctcaacaaattcctgtacaacaaagggaatcagactctctgaacaggtaaaatacaaagaaaggcagagagaaacagcaccttgttgttgaagttccagcgaccatttctgggaaaggtttcagatccacatcccattttcagctgtcagtcaaagaaaacaagagaatattacatgtatgcaaaagctaaaaacaattcatcatgtcaaaaagtaagcgatcgcaccataccttgggagctggtagaacacgaccctccacctgagtaaagttggagctgatcgaaatgccacaggatcgcaggagtggttccgcatcatagttgctaactttcagagcctgaaagcatgaaaccaaagatatgtaaattccagttcactgacaaaacagaacagttatgaagcggtcaggatactttactttggacagaacagtcatcctctcttggggtttctgtctggatttctcaacaagggcagatctttggaacgtggtaagtgcttttgtgtacctctgaagtggaaccaacgcgcagagctgcgaaaattccaccacattacatacattagcatgatttttgaaaacaaattaataccatgactatgagaacgttgatgagtataagaggcaaacctcgagaggaatgtaagtgggtcgctttggcttcccaacattgatgcaaggcaaatccgcagaatattgcaaatcaatatgccttgtatcgcggaagtagtcagcaactgtaacttcagtagtttcgaactctccattttcatttgggttccttttcttcaattcaaacctagacagtgtaaaaagcaaacttcagagaaccatttatctttgaaagagatcacaacgtcagaaaactaaaacagaaacaaatgcatctcacaacaaagtcaaattagtgaatatcttacgtttgttccctgcaaggcttgtcactcaatccggttatcttgaattcttggcctgaggggctgacctttacccttaggttcttaagggttcgtttagcctgttgaaaacaacatgttaaaatgtgtcaagccaagcaaaagaggtaaggaacatgtttagattatgaaaaagccacatatcataataagtagttaaccttagaccagtcaatcgaataagggtccctagcattttggttagcaattaggaaatcaaccactggaccaggcttgatgatcatggtggttgtaacatctagcataagaacaaaacataaactattagacactaaattattgctacaacagacagaatcaaacaccaacatcaagtacaagtgaaattatgtacccatattaagtgacatgccaccctgcgttgttctgaaactggagtgaaatcccctacatcctaagatgttaccaccaactggttcacagttggttggatcattgtggaaaaaagactgtcgaacaagcaagcaacctctgcaatttgtaccataggtattagaaagacaaatatatgagattaacaaaatacatatatacacttgacacttactgtctagcagcatgttgcctcaatatgatatcaagaacccgtattgcctcctgggaattctctgattcttgtccccgcattgcattagcaagagcttgaagaggaattttggccgcatagctgatctccactctaaagtttttggaccggttaggcctacgcagtcttttcctatcaccatcacttggactttcattcccattggggcttccgtttccattagccctgctcacaaaatccttactaagaacaaaaactaaagcacacaaccaatgtaatgactatagtcagatgatgttttaccttgtagcagatacttcctcaagcaccacagaaaaatccatcttgttactaggcaaagctccatatgtaaacaacgtcttctcaccgtcataagcaaactctttaccatccagatcagaatggtaagtctgatgcaccttgtcaaggatttttcttccaacacccttttgttcaacaggacgaccatcatcatagaatagagccacctgtacaaacccacaaataatcccattagtttgacatcattcagaaccaaataacagaataagtcaacataacagtagcaaaaaaacatacacactgcatccattctagtgacatcaatcatccaacaaaaataacacaaaatagtttcaaaaacttacactgtagtggaagaaatgaccctgaagattagccacatcgactttgaaatgatttgttaacaaggggatcttttggccccttgttccaaatccttttcgagccataggaactcgaactggccccttcttctcagcaagttcagttttaacacgaactggttccacatttggaggtataactggtggaggaggtggtaatgcctcagtaaccccactcccgtttgccccatttgctgattcaagatcagctccgttaccatttgttgaatccatctcctgctcaaagaaaccaaacaaaaaaaaagttcagatttcaacatttataagcaaaagacacaatcctatacaaaaccaagcaaaaatttcaacatatatgagtttgttctgtcgcaatctaaacaaacatcaaagcaaaaatggtaaaatttgagaaagtttgcaactttccttcataaatcccaaaagagaagtaaaatctttgactaaaactaaaaagccccaatttttttgacgcatgcaagtgtaagcaaacatgtataacacggaaaaacgtcagctttcatgacatagtaacaaaattgcgtcagccatgtgacagttcatagctttattcaaaagacaaacccagaaaggtgacatctttgaagcaaaaacctcatcaaaaatctcacctttaaaacaaaaaaacccacaaaatcaaagtgaagaagctctataagcaagaaaaatccaaactttttaacacattaactctaaaatctacaaaagaacactgcatgtgaagtattcaagcttgagagtaagaatttgtaaaaaaaaactcggaaaaaataggtttttgatatgaaaaacacagaaaccacacaaaaagtcacaaacccagagattaaagaagccacatttctaagaaatacacaaaacctatgagctaaagaacataaaccctacagtagaatcaaacaaaaaagcacactcacaagaccctaaaatcatcacctttgagtttatcgatgaaacaaaaacgaaaccctagccgaaacaagagaggattatttttctttctttttttttcaatttctctcttttgcttttttattttactctcaaaatttagctccgacctgagaggaaaatggttcagtgacagtagcataaatcgaggattcttcgctttcagttatgttcctctacgtcacggctccatcatagtagagctactcttacaatcttgaccgttaaaatggttgacttatgttattgacttcgctttgtgtcccgctagattattttaaattttttaatttcaattggtagtggtggtagacaaaccttctgtgttctaatattgaatgtgcgcattaattgacacgtacatgctacataactatggatttaacaactgtgttacaataattataaattattattaagcacaatataaaatttaaacagttttatgtctcctaaactatgtaacttattgtcaattagtttatgtgcttcaatgatctcgtttatggttgatcctcactggaatccatttttgattattgactaaaaaggtatctaagccgcaattataaaaattataaattggtgaatagagattaggtggattcaataaagaaaactataattggagatgattcttgatctgtgattaaggttataagtggagaaagacaaatagtcaagtgtgtgacatttggaacttacatagctagccagctggagaatgagggtatctacaaatattctctatagtttagttatattacacacatcggcaagttagctatatatggttaattacagatgcaattggaaccaaaattaaaatgatactccacttagagagacatcacatttttgaagtatataagatcaggaggtgcttgaattatgttattaatattatacattgtgtacacttgagatataggatataataaatttagttagttagtgttgacatatagtttttaagtgtttgacatttggaacgtacgtagttagccaagccagctggaggacaaaaactagctagttggtgaaaatggatatctacaattaccttctagctagctaggtggctaaagacagatgcactcggaaccaaaacaaacaagatacccgacttgaagagaccacattttaaagcatacaagatcaagagaggtgtttgagttgtgtctacgttcagacccaaagaaaattgaaagaaaacgatttctggcctaaccatctagcaagtgatatttaggatcggatgctttgtaacttaaaggaatttgtgtgcattgtttcttaaccattgtgatagtttaccaaattgattttgaatttggctaagttacgttagaggcttttaccacactaatcatgaattagcctaattgttagaggttcattatcttgaaaatatgtagatcgattgcatgatttctaacatcttgattgttcaatttatctatcttgtttatttgctcattttagttcttaattttgttagtttagttttcaattatctactatatatagtttaattgctttcatttatcccttcttttattctatgcatgttagggtattagtgagaccgtagattctcataccgtcttatggcaaatgatttcatcataatttaatgtgttatactgttatggcattttcccgtggatttgattcaatctttagttactccaatgacataccacgcatatgcgtaatgtgtatttatggttaaaattacatcacatgagagtatcggacaatttacaaaaatgtatacgaggtagtgtataagacggtgtatgggataattcatatggttcagtacaaaataatatactaggctgtgtgcgtgaagggatgtatgagatggtataaacagaggtgtataagatgatgtacaaggccgtgtacaagataatgtgagattatgtaaaagatagtatacaagatggtgtgtttaactctgtacaagtggtgtttaatactgtgtaagggatggtatatgagacaatgtataaatcaatgtacaagatgagacgagctgtgaaatttatgtatttactctaagatccatgagagtttcttcttcatgtctcaggtgaggaggttggcgaaaggaaggttaggaaaagtgaagataaatttgattttgttacaaaagtcaaaaacatttgcctatataacttaaatatggagcccattatcattattcgtagttagtagagcttgttcacgtttatgttacgatcttgtattgatagaagaatgttttcacttgtcttcgactgaatcagtgttgccttctctcaggttatatctttcgtctatgctttcgtcaaagcaaaaaatccctaaattagatgaattttatgccttgactcaaggcataaattcatcaaatgtggtatatagagcgtatttagcttcatatatactattgagtttccagagtcgtacgagcgctatcaagtatcagaagcgaataaaaataaaatatccttacgaaaaaaaaaatcgtctacaaaaaataaacatcattgtcatgtaagaaaaagaaaattgacaaactaaatattagttcttaaacagttgttgacccttcctctccactaaatcgttaaccaagctttcaaaatcaatgtctctaaccaattctctttcgattgataatatagccaactcactcaatctttcttgtgacatagtcgaccgaagatacgatttgatcaacttcagctttgaaaaacttctttaagcagatgcaaccgaaactggaatcgtcaacattgttcctataaagcaatggtaccttcaatatgagacaaaaattatatattaaatctgctttgaaagcaaagtgaaatttttgtctccaattataaagtaacataactattctaatgagcttttgctatttggatctaatgttatcatattattacctctacaacgttcatccttttctagcgcttgttgttgttcatcttttgcatgcggatcatatatgcgtgtaatctggtcgttgtcaaatttttattaattagcatttcaagccattgccattgtcaacgaatattcagtatttattagaaaaatcaacagaaatttaatatctatttagttttgttgaaatttaaagatataaatcaatatttactataaatttaattttagtaatatttttccgatttagattttgttattcccgtttttttatattgatcagttttagcgttttttagcggtgaacagtagactcaactcggattggactagacgggcgatcccggtagaacaggtccgaacgcccggtctggttcccaaacactgcaattaccgcatcttgtgttgtggaccggaccgactatgactgaatattgcattcattttgatcctaaaaatgtcaatcaatgctcatttatttattatatattttggaaaaaagtgagaaaaaactgaaacggtgcgacgttattaaatcttttaaatccccccaccaaagcatctgcttcttcctcttgtctctctctctctctctctctctttcatcttcaaactctacaaacccagaaaccaccacacagtaattaatgtctctttctttcttcccatgtgatctttaacagacttttcttcttattctccatctctgaagttgtggggattcatcaagacttccttatctgtttcttttataaaacaagagagagataccacttttggtgttctttatttgcaactctttcaggcaaacactctttgtctcttttcttatcttattattgtttctattttttgttgataatactttcgattttttttggctctctgttctttctagatcgtttggttttattgtctataatattcattttgacaatctatgtattgatatgagaacattacttcttagtctctttagtttttttttttgtttttgacccttaagcttgatttgttgtttttagcttctggtgatttgtttgatcaaagaaagcttataagtttttttttctttttcaggttaaagaaatcgataggctctgttcttgattgtggtggaagagacatgatgatgtttaacgagatgggaatgtatggaaacatggatttcttctcttcctccacatctctcgatgtgtgtccattaccacaagctgaacaagaacctgtagttgaagatgtcgactacaccgatgatgagatggatgtggatgagcttgagaagaggatgtggagagacaaaatgcgtttgaaacgtctcaaggagcaacagagtaagtgtaaagaaggcgtcgatggttcgaaacagaggcagtcgcaagagcaagctaggaggaagaaaatgtctagagcccaagatgggatcttgaagtatatgttgaagatgatggaagtttgtaaagctcaaggctttgtttatggtattattcctgagaagggtaagcctgtgactggtgcttcggataatttgagggaatggtggaaagataaggttaggtttgatcgtaatggtccagctgctattgctaagtatcagtcagagaataatatttctggagggagtaatgattgtaacagcttggttggtccaacaccgcatacgcttcaggagcttcaggacacgactcttggttcgcttttatcggctttgatgcaacattgtgatccaccgcagagacggtttcctttggagaaaggagtttctccaccttggtggcctaatgggaatgaagagtggtggcctcagcttggtttaccaaatgagcaaggtcctcctccttataagaagcctcatgatttgaagaaagcttggaaagtcggtgttttaactgcggtgatcaagcatatgtcgccggatattgcgaagatccgtaagcttgtgaggcaatcaaaatgcttgcaggataagatgacggcgaaagagagtgctacttggcttgccattattaaccaagaagaggttgtggctcgggagctttatcccgagtcatgccctcctctttcttcttcttcatcattaggaagcgggtcgcttctcattaatgattgtagcgagtatgacgttgaaggtttcgagaaggaacaacatggtttcgatgtggaagagcggaaaccagagatagtgatgatgcatcctctagcaagctttggggttgctaaaatgcaacattttcccataaaggaggaggtcgccaccacggtaaacttagagttcacgagaaagaggaagcagaacaatgatatgaatgttatggtaatggacagatcagcaggttacacttgtgagaatggtcagtgtcctcacagcaaaatgaatcttggatttcaagacaggagttcaagggacaaccaccagatggtttgtccatatagagacaatcgtttagcgtatggagcatccaagtttcatatgggtggaatgaaactagtagttcctcagcaaccagtccaaccgatcgacctatcgggcgttggagttccggaaaacgggcagaagatgatcaccgagcttatggccatgtacgacagaaatgtccaaagcaaccaaacgcctcctactttgatggaaaaccaaagcatggtcattgatgcaaaagcagctcagaatcagcagctgaatttcaacagtggcaatcaaatgtttatgcaacaagggacgaacaacggggttaacaatcggttccagatggtgtttgattcgacaccattcgatatggcagcattcgattacagagatgattggcaaaccggagcaatggaaggaatggggaagcagcagcagcagcagcagcagcagcaagatgtatcaatatggttctgaatattacacaatctctgtaacattcattctttcataataactctgttacctacttacctgacttgggtatgtattctattggcaccaaacactcatctatattgttgatgatgatgaagccatctattttttttgtgtctgaaagtcatttaactcgcttcattgttttaataatgtcactatccattgaacatcattctcatgctacaagtttgattctttgagttctattttttaatctttgggtttaaccgtataagttcaagtagccagcataacaatcatgaaacaatatggaactcttctcttttttctctttttcttttaagtgttaagtctgtcatttttgttggttgttctctagtcaactcaattcaataatcaatatcataagaaaaacacatggcttagccatatttatagggttataaaaagcatttatcttataatataagttatcttctttgctttcatgtagaaagtatattctcttataatttgtttggtcaaacacaattgaataatatagtaacaggttgccaacaattgcatcagtgtcggctactgtggcttcttcttcaccactggcaaattctaatgtaactttttttatccacattgtaatccaaaacggatatttatataataataaggtgaaaaaagccaaaaatggtgagagtgtttttgggaggaagagaagacaaacgttgttgtctcctttattttggaattggaggacaggccatgtgatatgcgttgtgaaaccccaccactcttttagtctcttcatcgccaaaactgactacattcatgcacccattttttggttctttattattcttatattctgaacataatatatagtaatgcaaagatataattgccagttttaacttagtaattttttggtatgattttttattttaatataaaaaagtaacgtagtaatttatgtaagtgtcgtgactatgcatcattcacatttaattcttatagtatatgactattttattttgtcattttattattcttaaacaaaaaatgttttgatatgttctaaatttccaattcaccaagataagttatggatctatcaattttcaataatttacttaataggttttgtcacaatttcattcatataatctgaattttcagtagtgagaatgatgataaacggattcggaaaaaagaaatatgatgagaaaagtggatgtcaaaaaaatattttcagttactattggggtgaggaaaaaagagaatcttctttttttttttttattatactcacaattaggaggctttaaaaaacaaataaaaatacagacgaaaaaaataaaagtagcgttgacgacttaaaaagaaaaaactaaaattgtttaattggaagaaataaactgtaaggctgtgaaatgtagttacagcatatggtagattcttaaatgaatgaaataatatgataaggatttatcggtggttgtggttgtggttgtatttcacactaacaaaaaacttatataaacaagtttaccaaatatgctataatttttctaagaaaacgaaaaccaatttggataattggataaaaaatattgattagtgggagtactgaaagtattttttctctttaaaagatttacatagttttggataagaaatcaccacttctactccaaaaagcgaacatgagacactagatctccatggtattgcaaaacttgtcatcaatactccaaaaagcaaacatgagatgctagatatcctggcattaccatcagctcattttcgttatgtttcatgtttgtaatgatgcctcatgtattatactcaagatattggagaaggtggcgttaagttcaggtgcacttttggcgttatgtgttattagatggtaattgatttgatcaagtaaaaaatgtattaggctattagccacgacagtatatatgcagactatatgaaggaagaatatcacatcggtggctaatagtgaaaatcaccttttaggttattctgcttgtttatacagagcaaaagcatgcctgctaatctgcttatacttgttggtggctttgaggcaaaacttagggaacaggtcagacttacaattagaggcacttgaatgtagtttattgagtctaagctgcactagtttgtggattgagtttaagctgcacagatttcccactttggttctgtttttagtctaattttcctcctgcttggtttctcgtttctcatgtgtgattctgttctgtttgattccttgtaggtgtggtcaagtcttcatcagcttgcctcgtgtttggttctgttcttttctcaaacttactaccactggctgtaagatttactatccaaatgtgctatttacaaatgttaagatttgttgttttatgcttaaaatgcttacgtctagatggtgtttgtgtcaataattggtatcgaattcagatatgcaagttctctctatgtataactgtataactccctctttttgttactgtttctagtggtttcattcttaagacacccacattaaaaaggatcaccaatagattatatttatagcaaagacacccattaaaggatgactaatgaggatcgcctaatgttacctttagaaaaccatcagagacataataaaatccttacacatcaactagttcataaaagagacaaatttagcatgtactcttgtcaaatacagactgattcaatcttagtagttcccatattttattttattttaagatttaacctattcccataaaattattacctgaaaaagaaaaatcatcatagaagtacgaataaatgagagctgacaattaaagagcattacctactttttctgtcctcatctatctcctccattgattacgcttcttgattgaagcaccccacagagagagaaaaaaatagcatacatacattctctagttccttctctcttcttcttcttcttctaccccgcacgaacgtttctggagtatctcttttctcttatctttcactccattacagagcaaagcttgactctttaagttcacatggtgtgttttaaagttccttcttttttactcaatttcgaagctttgtgtctgttttatcaaataatgatgagaaattgagaatgtgggtttttgtgactctttgattcgttgtttagagaattgggttttgggattttgtgttgaattgctcagttttgaagtcatgcagataatatgttcgatgatattcctgttagtgatgatggtgatgaaagtttcaggtttttctgactttgaagctcttttggagcttaagaaaggttttcagggtgacccttctcgaaaagttcttacttcatgggatgctaaagctttatcctctgataggtgtccgttaaactggtacggagttacttgtagtagcggaggtgttacttctattgatttgaatggtttcggtctgcttgggagtttcagttttccagtcattgttggtctgagaatgcttcagaatttgtcgattgcgaataatcagtttagtggaactctctctaacattggttcgttaacgtctcttaagtacttggatgtttcgggtaacttgttccatggcgcattaccttctggaattgagaatttgaggaaccttgagtttgtgaatctctctggtaacaacaacttgggaggagtgattccttctggttttgggagtcttgccaagttgaagtaccttgatttgcaaggcaacagtttctctggggaagtgatgagtctgttttcacagctaattagtgtggagtatgtagatataagcaggaacaacttctcgggttcgcttgatctgggtctagcaaagtcaagctttgtttcctcgattcgtcatttgaacgtaagtgggaattctttggtaggggagctatttgctcatgatggtatcccctttttcgatagcttagaggtgtttgatgctagcagcaatcaattgtctggttctgttccagtcttcagctttgttgtctctctcaagattcttcggttacaagacaatcagttgtcggcttctttaccaccgggccttctgcaagagagttcaaccatcttaactgaccttgatcttagcctcaatcaacttgaaggtaaaatgtatatgaatattcgtaccctcttgttctcatttttggactttctttgcaaatcttttttgtatctgtttagattactaaactgggaatatttgtggcaggtcctatcggaagtataacctcttcaacactagagaagctcaatttgtcttcaaatagactatcgggatcattacctttgaaagttggacattgtgccattattgatctgagtaacaataagatatcaggagaattgtcaaggatacagaattggggagattctgtagaaattattcggttgagttcaaactcactcactggaacactacctggccaaacttctcaattcctgaggctgacttcactcaaggctgctaacaactcgttgcagggtgtactaccatttattttaggaacgtatcctgagctgaaagagattgatctcagtcacaaccagcttagtggcgtcataccgagtaatctgttcatatctgcaaagttgacggaactcaacttgtcaaacaataatttctctggttctcttcctcttcaagatgcaagtactgtgggaaaccttagcttgaccaatattggtctgtctcataactcgttaggtggagttctctcagaggaactaactcgcttccacaatctgatttctcttgacctttcttataacaactttgaagggaatatccctgatggccttccagacagcctaaagatgttcactgtctctgccaataatctctctggaaatgtgccggagaatcttagacggtttccagattcagcgtttcatccagggaacgctttactgaatgtccccatttctctaccaaaagataaaacagatataaccttacggaagcatgggtatcatatgaagacttctgtaaaggcagccctgatcataggcttggtcgtgggtactgctctacttgctcttgtttgcgtaatgtttcattttatgttgagaaagcaacatgatgaagagaagtcggatgtgactggagaaaagagtattgttccaaaaactgaaccttcttcttccaatgtgattgcagcaaagaacagtgtacaggaaaatgaatcttcgtcttctactacttctactccctcaatcaaggccaagctaccggtttcttcttcacgtttctcccaatatagtgactctgagaattcttcaccatttttgaaagaacctaacgaggagcttcactctgaatccagaaaagatgaaatcttgtcatcccaagtatcttcttcaactccatcgctgcctaaaatccagaattcaccagataatcctacgtctcgccagacttctatgagattggatgggaacctgtatattttcgacagttctcttaagcttactgcagaggaactgtctcgtgctccggctgaagctatcggaaggagttgccatggaacgctgtacagggcagtgcttaattctgattctgtattagcggtcaaatggttaagagaagggactgcaaaaggtaagaaggaatttgcaagggagataaagaaacttgggaacatcaatcacccaaatcttgtttctcttcaggcttactattggggtccaaaagaacacgagaagctcatcatatcaagatacatggatgcaccctgtttagctttctatctccaaggtaaagacttggactttactttctagttaaaatttgattgttttttttcacttaaaacatgaattgttctaaatggttatacatagcgatgatggttttctcatcctctgttgtttgcagaggctggacagctaaacctcccaccattgttactggaaaaccgtcttaaaattactctggacatagccagttgtcttagttacctgcacaatggggaagcaattccacacgggaatctaaaatcaactaatgttctcctgaaacctcctgaactcactgcacacctaacagattatagtcttcatcgattaatcacaccagaagccacgtcagagcaagtcttgaacgcagctgcccttggctactgccctccagagtttgccagctcgagtaaaccgtacccttctctgaaaagcgatgtctatgcctttggagtcattttgttagagcttctaacaggaaaagtttcgggagatatagtgtgcagtgatccaggtgtcgttgaactcactgaatgggttctactgcttgtgggacaaaaccgtgcaactgagtgttttgatccatcgattgttggatcacagggctcaaggaatccctttggggttcttactgatgtcttgcaggttgctctgagctgtatctcaccagcaccagagagaccggatatgaagctagtctctcaagagctctccagaattgttctcaagaggacagcaatctagaagagctttctttgtgaatgtcgctgtaaaaatgtcatgttggattcatttagttcttccattacccttttttatttgtagcataaaatgaaactgtaaatctaaatcaaatactccaattggttacgagacagtatagagggaacttcataaagagtaagaaaactcgtttggcttagcttagttgcttttccttttagtcattcctactgatgcttgtaagtgaaagtgagaccaagtcgccaaaaagtccatcaaacttgttgatgattagcctagtttcttagtcgttgtcataggcattttgtcaggcaagtatagttttgatgatggggccaaacttagcttggttctaggcccatattcattaggtaagttttcaactcttcaatgaacttaattagggagagagagagacgtaggaactgagaatacgagcgatagacaatactctcctgtgtgccaagattaattgtagtttggtctctagcaatgggattagccatggtggactcagattgtagttatcttctcttgttctcatcatcagccctgtattagaaggtccataagaagccaacataaagtgtcattagaattccattagcctttgtaactagggttttagcaagtaggaattcatatgaccaaaacaaaatctatactactatttactacacaagatagtattattaatttattatcattactatgtatattaccaagttcccagagataacataatataacatacttagaaatatattacataactaagcttgatgaagaaaagacataatatccaatacttagaaatatattacactagataaggcccgcctatttaggcgggtgtacctgaaatttttaaatacttgaacgggtctaaacttcaaaatccaaaaaactcgaaccagaacctgaatacgtatccaaacatatctcaaatataaatatatattagttacatttatacttatatatagaaaatattaggatttttttggatatattagttatttttgtgtatttttagatatattcaagcaaaactactcgtgttgttttggaaatttttgaaattttcaaataatttaatagatttgcacacaaaatttgatatttcaatatataaataaactcgaacccgaacccgaacccaaactgaacccgacccgaaatcttaaattacccgaacgggtcctaaacttctaaacccgaaaacttgaacccgaaatacccgatccgaatacccaaacgcctaggcttaataattaatagaaaaaacagaaatccataaaaatatttagaaaccaaacattgttgaaaatatattttctatacatgccgtaatctcgtaagctaattttacatcatgcaaattaatattaaatgagttaaaattaataaatgaaaataattgaaaagttaaatcttataagctaagctattttctcaaaatgttctattttcacttataattacatgagttaaacacagatttgttaattttctttttgttgaataaatgttaattgtttataaatatatagacatataaattagtatatgtaaatttgtttactttttaagattttctatttttttagagaataaaaaagttaaattttgaatgacacatgtaaacatctgatcgtttgacttgacacgtggcacgatcctatgagttagtaactttgaaaaccatactttatataataagataactaaaaccatacttctacgatatacatatatatttaatagatctgcctactagttatatacatctccttagagaagtactaggtatcgccggttttatttcttcacctcgcttttgagaacatcttggagaagagaacccttttcaattcatgtcattgttgaacagagagttcatgaagtcgtcatcaaccaattcctatataaaaagaattaaccaaaattatagtttctaagactcataaacttcaaaataaaactgttatattcttttagttcttgtaaacactatatcgtttacctgctgatccaaaaacgaccaatcggtaaactctggaacagcttgtccctaaaaaatcgaatccagatttcagaatatatttaaacaaatatttcgtttatattaagtatcatagttccatataaatattctgacttatataaattagaggtacctgattctgattagggttaatgttgaaatttggagtattagtctccggagtagcaatagtgttcgatgattctccattagattgatccttaacaaccaagtcatgtaagtcaataagtcattaacaaatgccgatttctatttaaacataagactagctaggcagcatgaaaacttttcaaatctacaaaatgtctaatactaacaagtatagttagaaattttccatgatggatagttttctaaaacattaatttgataaaatctaatctttgataggacgttggttcaaattcgatttttgctattgctaagatctcttaaaaaatagtaaatacctggtttatgttcacgaaggtccagtcaccatcttcttctccttgtttctgctacacaaaccaaatttttttttaaaactcacatatctcacatcacctacttcatgtatatatatcattttaaatttagggttgtggaaacataccttgttgtcatcggattgaaagttacttatgttgtaaggaagctcactagtgttgccgagatcattgtataagttgagattctccagttgaggaagttcatcaagatttggctgtgtagttgcattggcaggtggctgagggttatatgttgcgttctcattgtttaagaccgattgcatcccataggagaagtggctagttcccggttgattcggagtcaaacttccatagctgctcatcatgttagtattgaaattatgaccactgatagctgacggtccaagttgtccaaacccaagaacttgagatgtttggctgattttgttcgccatcacgggtggctcgaaaacggttcttgtttcttcgttttgagatggttggttttcgaaactgatgttgctttggatgggaagcgtcaaggttgatccagatccaatactgcggctcataggtggctgaccggttcatgtagttgtaagacatttggttgtagcggacgggctcacgtgcttcggacaagagtctagagtgtccatgtacggattcggaatagaatgatctattgttaagacttgtctcataccaagaagtagatggtgtgtaatagttgacgtacggctccttaatgtgagtttgtcgaaacatcgagtctttgcctctatctgacagcatgctaaacctaccttgatgcacgactctcttcacgaataaccgatatttctgcaaaatgtagcaaatgattttaagttaaataaaaagtagaatgtcacataatctatggtatgatgtatttaaagaggatgaaaaaaaattcccaagcttttaaaagccaattaattaaccaaacacgatttcttttcgacaacttttaaaagtttaaaccttctctagagggtgttataacgagctcttattgttgactaaggataggttcaaatcaaaaaatcaactcaaacttggaagatttttatgcttaataagatagtaaaaagtttttttgtttgattcgagttaatagagggtttttttttaaatatattttttcccattttaaacaataaaatccaaatacatttttgacaagagatatcaaacctgtaaatggctggctacgttctctcttgtcaagtatggtacgttcatgatcgcgaggatctttttgggcaccacctctttggaagattagtaaacaaacgtaaaacattagttagtgtgtggtgacctgaattgtaagaaaataaaccgtgtgtatatcgattttttttaagaaatcaaaacacttactatcataaccgatatgttggatagcctgtaagaataggtcttgaagaggattcgtccaccaaatctttttcttcttggggggttgcgacagagactcgccatcatcactaggaccacctttgggttttcgtttccgattttttcttgaaccattcgtactaacatgacttacatttgtactgttcacggttcttgtatctgatttagatgagcagttcttcttcttggtctttaaaacgtaagcttgctcaggaaccaacatgatttgctgagggacactaacatttgcgtccttttggttttgctcggtcgataatgttgatttaccgttcctcttgtaggttaaagcaaactggtaaatctttggtaagtcagttggtgctatgggttttggaatgaaacccattgctccacaacttaaactctcttcttctttgtttgggtccgatgacataactttagatcaaaagaaatgtaaaggaaaacaaacggttaaatatatcttaaactataacaagcaaacaaaaaacataatttgatttaaattgtaaagaataaaaaatgttacctaagactgataaatttccaaattcttgagtgatttgttttttgagttgtagaccgttcatgccaggcatgtaataatctgtgattataagatctatattatctcgttgattttttagagtagataatgctttcttcggatagtctacagctataaccgtgatctctataaccgatggatttaaaatcatttaatcaaaataaaattaataaactaaaatataatgtgaaaaatattgcaagttctaagaattattactttttgattggtttaaccttaagaaaaatatattttacttatgtttcgtatgtagggcttatataggaaacataaggtttccacattagttatgaaatatttcacaaattttaagaaaagttcatagcatagtaaaacatattctataaaatcactacattttcattgaagtgttttcaaaattgttgtgattgaaaggttaattggtcgattacttataagaaaagtcgatttgaagaatatcagctatagttttaattaaactaagaaaattcacatgtcgtatgcaaacacgatctacaaataatttctttttaattcaacactatgttactattttctaaataaactattgttcaacaatctcttttaaaaattacatagtataaagtatggtttgacaaaaaataaaaagaaactttacatatagcatattggttaaaacaaattatcaatcaaactatcgtttcaatgtcatcaaaatatgaatacctcaactgaaaattgtagatgtgtacatgtaaacggaattcaaatcctgattatttagaagaataatttttaaatttcaacaaaatatatagaacatctttaaatttctcgattcaagttttgtttttaaatcagctagttgtttctccaaaatttgtatttcatgctaaaaataatagaaataaaaatctaaatgaaatcacaaacaaaaaatcaataacatattatatatgataataagattttacctctgtatttggacttttcaagcatgcgtgaccaaatatcaaggaaaacacgattatcgtccacaaccatgacattgattttcaagacagagctttggttgtagacagattgagcaaaagccattctaataatctttgtaaagagttttttttctctctcaagtatgtatgaaagatttaggttgcacaaatttcactatttaaaggtgagtaaagtagacacgcaaatgcaatatatggcaatattgtattgatgtactgtatatgtaaatgttatttgtagaaagaaataataataataataaactaagataatgaaaagttaattctctttactattttaatgataaaattgaaaataaagaaaagttgagaaaaattagaaaaagagatacaaacaaaatattaccattgctcagaaatagcgtgtgctaattaatgtaaaaaaatctagactaagttaagaaaaatttaatgctatttaccaataaatattttatatttaacaaaaaaaaaacaatggtagtacaataatataaatgaatttctagtgtttctccatattttttctttcttgtttaagattgattttcatatagattttcaacatctttgttggatttgtgctataaagggaaaatattgcaatattgtttgtagaaattctaaataaatattattttttcaagattaacttctatctgtagaaaaaaaataaaaattgatgtagtttttttttttgtcagttaaaaattgatatagttaaatttgccgatcctaagaaacctagtttgttccatccttgatcatcacatattatacataatgtgattagaaataagattttaaatacacagtctttatttttgagttatctgattttgatattttgagtttcatataaaagaaaaatatttgtcattcacgtttttgtagtgattatttttcgttttctattctaataccaaaatgcgtattaattcctatgattttgaaataatcaaataatttgttatatatataatgacatgatcataatatcccaatttcgaaataaatatttcaatcactagactattttctcgtaaataataatatatatcaaccataaaataataatatatattattactaaacttatgaaaaatgaactataacatcatagctaaaagacatatcaggcggaaaatattagtttaatttattatataagatgggtattacgcgtgtcaaaaccgtttatttactataattattagatgtaaaacattctcaccgataaaagcgacaaaattatattatcatttttgttgcaatttggttactgaaagtaaacttctaattatggtatttgttaaacagtttaatattccgtataacgattttaacgatatttttgttgatggtataacgactcaatctaaaatactaaaaagataagtaacttaccatcccatttttaagtaaaaagcatgtaatgttaaataaattactaaacgttttttttgtttgacagtggaatttgtagtcatcaaataatcacatcaataaatataataaaatcaattaaccaaaaaaaaatggatcatatatctccagctatatattaaatctttaatacaattgtttttttttgcaaacataaaatagacttttaaaccatattttctcaaatatcatataactactatattttgttttaaatcttttactgtacatttataactactgctatctattgattttcaaaatttcttccaaagtcaaaattttattattaatatttcttaattttaattttagtgatatcttagtcagtttcttattcttctgtaatcaagagtcagaagatctagtcaattttttataacgtctgcttgtaacgcagtgtcgtccgtttagtgtgaaaggttgattgacaaaagcgtccgtttagagaactacacaagtgatgagaatctaagtatgtacgttaaaggtaagctgcatgcaaaacaagagatttgctgataaatgacacttgtacttttctaattaatttgggggaaaccaaagtggtttgtagtaatataggagaaatcgaagcattaatggttttgtgattatgggaaagttaatgtatttaatagtaattactagtattaattgatatattaataagaaacagctttaactgtacaaaattaaaagagaaatggaaaaaacaaacaactttaaccatgcatgtgttgacaattgctaccaacaaagatgaagtgaacattaattatccaaacttctttattggattcttatttttaaagaataaacaatcccacacaaaaaaaaaaaaaagaagataaggaataataacttgtgtaaaaaaaggataattaatagtgatatttaaaaatgataagattcttgcatttcttacaagatacatagtttgatataggtcatccctaaaccttattccaaatcattaaatttcacataaaaaaaaattatgaatataaaatttaaattttcaatttcaaagatattttccataaataaaagtcaaacaatggagaatattaacaatgtaaactatatcataaaattaattaaacagtaattttgttaattaaaacatatgaccttaatcttgtttaataacaatatttctttaatgtttttgtcataaaatcccaaataattaattgaaaatcacataacttaatgttgtaagatattattttaattgaattgatatattttcttcatattattgatatttaaatctttcatagatattctaaagtatccatcaatcttgttaaaatctgctatagattatatatattaataatattccacataagttagtgattgatcttatgcaaggtaacagcctcaattttggatgctataactggatatgcgaagctcgacaatggcaaaaaaagattctatgaggtccaattcaaatggacaaccaaaaccaataacagactgacggatctcctaacatcaaactctatcccaaattataattatttttattaatacttttaagctcctttatttatttttgacgcgttacattgtaattacgttcaatctttataataaaatagcagatgttaaaaaaacaattccacatagtttccatattatattcaatttttttgaataatttattaatttaaattcgaaaatatcaaaattcattttttttgttaaatttaaatattatattttaaaatatcttatatagtactttttacaattactattggagatgaaaaattcataagaatatagtactattattgattcgatttttttttaatctatatatatacccattaagacacaaacaatgttaaattttggaaacattcatttacactaatctacatatatattttctgcttctgctttcgttaactcgtaaacactaacactaataatctggaattggaaacggaagcaggagcaaaaaatatataatcaattttgtaagggataattgtggaaccaaacccaattcacttgtcctctcactccacaggccattaaacaggccaacattttttttggttaaaagtaaataggccaacattttgatacatgtatgtcatatatgttcctctttaattatgcaatgtgaacactttatttggagtattttttatgtttacgaattggtcaatgcacttcccaacctgattatatggtaaagcatgaactctatattttatattttagtaacgtagtcaaattattaattgaaaattcatgcatttttattgaatattagaaacgaaagggtcaagtgcagcatgttttgtctccttccattttctctgcgagacctcatcatcattgtgagaaaacagaaggaagaaaaatcttcagagctcctttattgcaaggtatgtcatatgtgcaattttttctacatgatttttatctatgatgatagatgttgaaaaattctatttgttttgttcacgttttgaaaatttctgtaatatatgaacgatcataacgcataagatgaaaattagaacaagatataatgaacgattcctgcttaattcatagacaattatacaaatagcgtgtaatgttcatcaaaagagaactaaatttttaccaaaaaaaagtgtgtgacatcttttacttttgtaattattttctttaatcacgagtgaaaatttctgtagtaatagtaattggcacaatattaatttgtatggtgaaatttaatttgtatgctagctattctttcatcatgacaatgtttgtagtataggatcatattctatattttctctttttgtttttttttgtttttattttctgatgataaagtaactatcatatatagataacaatttcttttagtttttttggtgccatattttcacgcaattaggttgaaccactgtcattattttttatccaaaacaatggtcaatccaaaccaaagttgtattgaccatttctgtattacatctataaaaatcctcgagttttgttgatagttatttaaatttactgtatagctaaaaaaataaatcaatatactagttcaactaaatcttaagactttatactctataaaataagttttgtttagttaaagtataaaataaagaaactatataattgcctaacgtgcactccacaatggtacagtcttagttcgtgatctccgcatacattttattagacaataatgtatttgtgtggattgtgtaaatatgcatcttgacgttttaaaaaaaaaaacataactgtctgtatacgaaactaatacattcataacgtgtttatcttaagtaatggtttggtaaatagtagtatagtagttaacaatttgatataatatggtttgtaaacctaaactttggtatttttgaaacttttcaaaaatagtaaagttttagacaatttttcagtatattctagccttctaggatacactcttaaaagaaaacgtttttaaaatttaatatatataaccttctatctgtcttttgtggtatattataatgtggcaagtttaacaaatctttagaactgagacaaaaaaaattggtatacttggtcaatttctggttaactcaatttgaatgggtactcttaaacacacttgacacttttctgtaaattgtaatgtgtatatatcattagctgttggactccgcggtttaacaaaccgtgtttgcttttctgccttttagctgtaatccatcgatacagacttattattctttaacttgtgcttcttatcttactcgtgagcacgttattcaatttttattcatttcttattacatataattaatttgttgctttcatgtttcagtttgatcacttccttattaatagtatatactttcaaccttatatagattactaagtcaagttttaattatttttacagtatttctatccttattaactcattgtttggttttaattttttttttttttttgaaaattttagtatagaactggggataaatattcaaattgtttcaaattaaccgctgttaaggtttaaaagataaacaaaatatccaaatttttcaaaactttcatacttatagaaaaaactaataaatgtttgtaacataatcgtaagaatcacatatatgatacatatgtttatggtctagttgaaagatttaatataaaattagaagacctatgttagaatctccacactacagtttgcaactattattaactattgtgaaatatctaaaatagcaaaaatactctggatttctgtataagattttatgatttagaaaaaaaaacagtaatcaatatttcttcataatatacatcttaataatcacacgaatcttttctttataagttataaaagaaatagcctgcaaaactacaccacataaattctctaaacataactatctgaaatattttattccatattaatatgttcaagtcagagatttctctcttcattagttcatataaaacttcttattcttggctttagacaaattcaacactaatcacgtcttgattttattaccaactttaagcatttgaaaaaaaaaaccagtggatttcgtgtgggccctgcataagcagcgcgtgcaatcaatttgttttttttctctacgcgttttcgccaccttatttattttcatgcgttcatatatttttctcattaattcacatttaaacacttctctgcatatatttgcttctccgtttctcatttctcaactctcaaactcaaatcacttcctttgtctcagtgactctagtctatctccaatggctgaacgagtctatcccgccgattcaccaccacaaagcggacaattctccggcaacttcagctccggcgaattccccaaaaaaccagcaccaccaccatcaacatacgtaatccaagtcccaaaagatcaaatctaccgtataccaccgccggaaaacgcacaccgctttgaacaactctctcgtaaaaaaaccaaccgcagtaactgtagatgctgcttctgctcattcctcgccgcggttttcatcttaatcgtcctcgccggaatatccttcgcggttctctacctaatctaccgtcccgaagctcctaaatactccatcgaaggattctctgtttccggtatcaatctgaattcaacatctccgatttcgccgagttttaacgttaccgttagatcacgtaacggtaacggtaaaatcggggtttactacgagaaagaaagctctgttgatgtgtattacaacgacgttgatataagtaacggtgttatgccggtgttttatcagccggcgaagaatgtaacggtcgttaagttggttttaagtggttctaaaatacagttgactagtggtatgaggaaggagatgcgtaatgaggtgagtaagaaaacggtgccgtttaagttgaagattaaagctccggtgaagattaagtttggttctgttaagacgtggactatgattgttaatgttgactgtgatgtaacggtggataaattgacggcgccgtcgaggattgtgtcgagaaaatgcagtcatgacgtggatctttggtgatgaatttgctctttgttttttttttttaaagaagaaaataagaaaagaaatgagtacagaggatgtttttggatttgtaggattttttttttataaattataatgttgactttgcattttttattttgggatgttttttttgatgagaacatataatgttgtgaatttgtgattggccggaacatttccaatttgaaccttattttatgtaagttgaaaacttcttttttgtacagttcacattttgaaggagtagtttgctgttgagagaataataaagttggttttcaactttatataataagaggttttcagtcattggacaacctctgaaaccatatttaattatttattttgttattcccaccacaaaggcacaagttaactatcacaattatctgccaaattcatgcttgaagcaatctttttatgtaatcccttttgcatttacaaatgcctaaacccaattttccctccaaaattctaacctgacaaaactccatttttctaagaaaccaaaaaaattcattttccttgtgaagagtacgccttcttcaactgctcgtagttgtttttagctccgtggattccttctttaagttcctcatacattttcactgatgattctgcaaactggttgagttgtccaacaaatccttccaagcttgtcctaaaccgatcaaatcccggaccacaatcctccaatgtctcatcttgcaacatgtgagctgtcaaatcgtttttgttctcaccagatcgatgtttcttggtgcgattcttctcctgacgtggcaagaacctggcaacatcagaagcaagtgctttaatggagcctgaaacctctttggtaggtaagacttcgagcttttctagccagattccacaggttgcataaatggggggcccatagtttctcaaagacggttgtggtgcacgcctttttcgtttggatcgttgtggtaaggcgacacatttcaccagccactcgtttatcgcttgaatatacgatttctggcctgtgatccattttgtaaagcttgaggccaatgcgcagagctcatcttcaaggtgagatgttacttgtctgtgcaactctgattgcatgttgagtttaatgtttccgcctctgtaacacgctttgattaactgaaactgaaccttgtggcattccaacattacttcccacatacgactcaacctattcacatccaagaaatgatatatataatggttcaggtcaaatttgaaatcaaacgaattgagtatactggagagagtgacttaacacatacccttcaatgagttcttcaagttgaggctggagctcattgtcacggagttcttcaatccgtcttgatattgagtcgatcctatgaatcgccactctgattctggagtgaaggtctttcacaactgcacgtgtcttgtctattctttgtgaacctttaccttctgattcaagttctctcaaaattctgcacttttcgtcatactctctccgcacagtctgactcccctgaaaccgataaaaaagtgaagaaaacaaatcacatacttttactgcaatttcttgattttcttaaaaaactattcaatgcactataagtaccttaacttcatcatagagcttccgctcccatgcatacaatctgtctagcgttgaggcatggcttccagcaatcatgcaaatgttttcaaagagattactattgagctcttccacatcatcagaattcattcctccgagaggattccgagaagatgaggatcgtgaagattcagtcctatgccaggtcaagtatttcacagagttctgagcaggctctgcacaaacaacttagactgtaaacactccatacaatctacaacagttgacccaaaatttagataagcttgattaccttccggtacatcttttggatcttccccacaagagagacaggttttgaacagtgatgatgcaccggagccacctgcaaaaagcagagataagtgatttaaagagtgtttttcttcagatatgaatcacaatcagtaagcaatttagatgcagagacacattagattaactaaggtggaatttacgcatacatatacgtgcaagtaaaaccttcagagataaaaattattactttcttttgatggaactattggacggaaatgtagtttattggcttcaagcatcctaggaacctcttttccagtctctgaagctttaacaaagagcaactctatctctttcatacttgacaagaagtccctgggaggaagcttgttctcggtgtgatctcccttgtttggtgttttgttcactggagtagctactaaaggcgtcactggtggtgataactcaggagttttacttttctcagcgtctgaggagtcgctttccactccctctctttgaggcaaagtactgtgatcacggcgcactctattgaagttttcaaagcttctaacaagagtatcacttgtgggttcatcaaactcatcatcatccgaatctctggactcttccctttcttgaaaagaaaagtcctcaccatcatcttcctcctctggagttccatcttcctccttaacagatctcgacacatgaccattcccaacatgagaagaagaaaactggttgtcaattggatgagaaagaccaaaataatcccaaggtgcttcaggtggcatggaagaagattcctcaaatggggttgattccatcttttctatagacctgcttggtgggatactggatgaggtaacagtggcaataatagatactggtggtttctcttccactttttttgaagaaaaccctttgaatttcatatgattgacctggaacggactggtactaggaggcgacggaggaggagaatacgtgtcatggtgggaatgtgaagcaggtggaggagagtatgacaaatgagaaacagatttctcgattaaagcaagaggttgttctggtgttgcactagtggacgtgtacaaggaagattcaactggaacttcagtctcagaaaatttcctgagggcagttccggtactcttaagagactgaacgtatgaaacgtgagcagcagctaacaaacatcttccatcgagtgcttgttggacgaatttttttctttctcgacataactgtaaggctttatcttcatctattctggatgttgatgcacccattgtccaagcttacatgcaaaaaaaagagtaacatgagttagatttacaacctgcagaactactagaatagcttcaaattcagaaaaagaaactttaattagtggggagtgatcatatgttaattaggactcactaactattccgactaggaaattttctgttaagtggttttggagattctaataaataggaagcaggacgatggatagatccatcctgcgacataggcttggtttagaccgagggaactgtgttctgtattttggggttctatttcagttattgatttcagtaaaatagtggttctgattatattctagtgatccttaactctaacaaaaacaaacacaacaatcacaaaaccacttcaaaaaaaaaaaaagtattaaagcctctcaagacactgtattctagggatcaatgcactgacccctggcaagacccgatcagaaataaccaaaacataactagaagagagaattaagtaatagcgagtcatctgttccactaagttatctaatgcaaaggtgtgagtgagagtatcattgtattcatgttgaatatgagagaagaacagtgccctttattaccaaattgcatcatgatatataaaacaaatgaaaattacgcattgcaggatatttgctatttagcgagacatgatcattctctcaaatctcaaactcaaatctcatgcctccgtatatagaaaaaaacaaagaaatcccaagcaaacacaacgaagatacataaattaaatccaaggcaacaaatacaaatcaagcttatgttgctcccaacacaacacaaatcaatcatacataccaaataaaaaaaaccctcaaagcaactatctatcaacaattaaagaacaaatttccactttgaaatcctaacacaatctaacctattctcttaacttagtaacctgttccgccgtttaaagttcctcaagcaaaatccttatggaaagagtaaaactttcacagaaccatcggatagatgacaaacaatcagaatcacataagaaggcaactttttcgtaatcggaatcccaaaatagggcgagagagaatataaggagagcataaccaaagtcataccgcagacaaaacacaaaactgattgaacaaattaagaagttttcttagagtaatcgaaaatcaaaacctgaaaagtgcacgaatttgacaaaaaagagagatttttatagaaaggtaaagaaacccaaatgaaattggaccattagagtagaagaaaacctagaaaaggtgagatttttcacacaagtagaagaaacaacagtaagatggagaaacggtgatacctaaagagatgtcctttgagagctttggagttacgcgagaggatcaaacccaaaagaaaacaaaacgtcttcttctacaggagacgaagaagaaggagagaggtggtctgtgtcgtgtgtgagtcagcagcgaatcagatgggtagagagaagagagagagagagaagaggaatcttatgcgagaggagaaaaaggagattgtgtgtgtatgtgtgtgactaccaacatgcaataaagcatttgcttgcttgtaaagacgattttgacggatgactccaaaaacggtaactttctcttgccgttgttatttctactccggttacttttcttacaccttttttttgtttgtctttttatttttttaaggattcattagtttatgataaacatccttaatctatggtcttagtcaattgctttacaaaacaattttgttacatgtcaactcacattttagtattttactaataatcaaatccatagacagattatgaaaaaataatccatagtgatcccataaaaaatagaaactaatcttatcaaattgacagagatactaagacttattattggcttaatttacagaattgtttgaagaatttttctggaaatgatgggaaagaatctgactgaaatattaaaatagttttgcttcgatgaaatggaggaatagtcaaaggtgtggacaaataattaacatagaaatccaaatactgtattttcataaagacgaagatgggcctctgagagtaaggcctatttatgaagacgaagatgggtctctgagagtaaggccctattggaaataaagctcactgtaacagtaacagcagcaaaacccgtaaaggtagagggagagacacagaggcttcgagtgaaatcgtacattctccgatttagggttccgaacgaaatggccgatgttaatcttcctccgtctgattccgtcgataaccgtctccctgagaaatcaacctcttcctcaccacctcctccaccgccttcttcttctctgccgcagcaggaacaggaacaagaccagcagcagcttccgctacgccgtgagagagattcacgagagcgtcgtgacgagagagacatcgaacgtcctccgcctaatcgccgtgaacgtgaccgttcgcctctcccaccgcctcgtagggattacaagagacgtcctagcttgagtcctccgccaccgtatagagataggcgacactctcctcctcagcgtcgctcgcctcctcaaaagcgttatcggagggatgataatggctatgatggtcgccgtggtagtcctcgtggtggctatggaccacccgatagaaggtaatcttcatttcttatgcttacacttcaattggaattacatcagagttaatttgttaccgattgaattataattcaaagtcatatgggaactgtgtttgcattgttgcttagctgataactgttgattatcctcttgtatcgatggttgttatattccatcgttttcgagatttcctaatctgtactcaatttttactttgcatgttagatttgggtatgaccatggtggaggatatgaccgtgaaatgggtgggaggcctggttatggtgatgaaaggcctcatggtcgctttatgggtcgctatcagggtgagacatctctgtctaagatgtttttacagttgagagaatcagtattaccactttttcgtatgatttctgtcttgtgagacatgtttaagatacctatcattgggcgttcttattatttgtggacttctgttcatttgactagcttcgtatatttctctctgtatgctgtggattggaaacaagcgatttacattagaagataagatgtcaatatctaccttttattgtgtgttacttatggcagactgggagggaggacgtggaggttatggtgatgcttccaacagtggaaatcctcaaaggttaaggttccttcttcttttgttttttaaaattttctttgtatttcatgggtttgttgtctttttcctatggcgtgtttattcttggtagcgtatttttaatcaagttagtgtaaactaagagttgcgaactgtctaatggtgctcaatgaatggaggatacatcccttgtagaatgttctttcttcgatgagacatatatgtttttttccttatagctccggaaagttagagtgaatgtttgagagacaccattatagtggcacacaactgatgctgtctgtatcctcccttgctgttgcatttaacgatactacctttgtaattcctttacccagggatggattgatgtcatacaaacaatttatccaggagttggaagatgatatattgccatctgaagctgaacgcaggtatgatcatttctgctacttagtcttgttacttaagcaatttaataataaagctgcgggtgtaatgcttttttcctgatgcagatatcaagaatacaagtcagagtatatcacaacacaaaaacgtgccttttttaacacccacaaagaggaagactggtgatttcactatcttttttcatcttttatattcttctgggatattctgcaagctagcctaataacatgtgtatctatgttgcgcatctaccaggttgaaaaataagtatcatccaacaaacttactatctgtcatagaaaggtgagttcaagagtcatttgaagcaatttgattcggtgttagtgcctgaatagtgtaatattaatactatacatccttgattttattattttaattttcttttcattaaagaaactgttcaactatagatattcctttgaaatttttcaggaggaatgaccttgcacagaaggtggcaaaggatttcttacttgatttacaaagcgggacactagatttgtaagatcatttctttggcctttattccacatgtgtgactgatcacaattctgtcatctctaacgctctcagtttcccttctgttccagaggccctgcagtgacagcattgaataaatccggccggaccagtgagcctaattctgaggatgaagccgctggtgttggtaaaagaaaaaggcatggtatgggtggagctaaagagaatgaacttctttcagccgcaccgaaagcacccagtttcacctctgatccaaagagaatcctgactgacgttgaacaaacacaagcccttgtgcgtaagctagactctgagaaaaaaattgaggaaaatgttttacaaggttcagaaactgaaaaatcaggtagagaaaagttacacagtggttctactggtccagttgtaatcataagggggttgacatctgtgaaaggccttgagggtgttgaattacttgacacgcttgttacatatctatggcgtgttcatggtctggactattacggaaaggttgaaacaaatgaagctaagggtttgcggcatgtgagagctgaaggaaaagtttctgatgcaaaaggagatgagaatgaaagtaaattcgactctcattggcaagagaggttgaaaggtcaagatcccttggaagtgatggctgccaaagagaagatagatgctgccgctactgaagctttagatccacatgtccgaaagattagagatgagaagtatggttggaaatatggttgtggagccaagggctgcacgaagctgtttcatgctgctgaatttgtgtacaagcatctcaagctgaaacacactgagcttgtcacagagctgactaccaaagttcgggaagaactgtattttcagaactatatgaagtatgtaggctttttctcttggattcctctactgtcgtttctgacaggttcgtaatgaaatttttttgtgctatttgcagtgatcctaatgctccaggaggacaaccagccacgcagcaatctggcccggtacatgatcttcttttgagatttaatggagtgttgactagtctgtacttttgggttatcacttgtttagcttggtttgagttttatttacgtgggttaattatactttcaacagagagatagacctataagacgtaaacccagcatggagaacagactgagggatgatagaggtggacgcagagagcgtgatggacgtgctaatggaaatgacagaaatgatcggtcagaagatcaacagagaggggataatgatggtggaaatcctggggaagttgggtatgatgcatttggtggacaaggtggtgttcatgttcctcccttcttatcggatataaacccaccaccaatgctgatgcctgttcctggtgctgggtaggtttaataaagattactcactcccttcatgatcttgttttcagaataaattagttactgtgttgaatcaatgatcttaatgtgtctgaatgatgatgtggtcaggccactgggaccatttgtaccagcaccacctgaagttgctatgcagatgttcagggacccaagtggacccaaccctccttttgaaggtagcgggagaggtggacctgccccttttctgttgtctccggcctttagacaagatcctagacggctgcgcaggtaacgtagttcactctgtgctatgagtccattaccctatgatcaagagtgcagtgtctctaaggtactaatgtatgagaaatttggtgcagctaccaagacctagatgctccagaggaagaagtgaccgttattgattacaggagcttgtagacaagacagggctagagagatcccgagtttactggttcgggttgggttaaagggcatcagtattagaaggcaaagctagcagattgtggcattttcttacccttttgatgtattatgtcttgttcctcccaattttcactcactaaagcgtaaaatacgcactccatacatttccttattgtttttcaaaatttttcatgtgctttcttactaattctgttcgacgatgattacataaatagcatgagaatttcttgtattgaataatgcgttttatccacattgtttgttatcaatacttaagtctccatggcagtcttaaatctccatggccattaaatataatctgcagtcaaacgaatgactatccacaagaatccaggtttttagggttcaatgtaaataagaaggatatatacacttcaaagcctggctcaatgcctaccagattctacacacttgcgtagatgacgtgacacttacacatgttacaattacacataaggcattgtatcgtaaatctaacaacactaatcacagacgagctctaatgaggttaacaaccattttccaaagttttcttttccagaggttgtttctctctctcaacatcatttgcgttgcttctttgcttgagattctgtttgtagctctccctgcaaatgcaagataccgtttagatactctataagacaatacatagaccaagtaatagttcaggaacaattataggtcgatatgaacctaattgattgctgttactattactaattcaactatcattggccttgtaattatttaataactactacttggaaaaagaaaaagaaaaagggagtgtgcctacaacgattgagagctgctcacggatataggccattgatctcaacatggcacctagtgtatctcgggacacctgaaacttgacctctgattctcctgttgttgtctcggtatcttgaagctggagtaaggaaaacaaaagaagattttttcacactgttgaaaccttctagttcaattaagagtccctaatatggagtaaaacattgattttggtaatcaaacatgaaatttcatattcaagtagtgacgctagtataaataactgcaaaacgtatggcaagttaacatgaatgagagaatcagcttaaacaagtcaaacaacacagaagtttcacacactaacggtagatggaatctatgttagaacaaaccaaagacaatcaataaattaaaaggagtttagtcaagtcaagaagactacatgagaagctacgagcctagagtctaaaagacataccttcaaattgatgacagctactctattggctggagatgaaagttgctcgctaatgtaagccatggaccttaacatgggttcaagtgtgacgctagacagctgaaatttgacatccatgtctgctgagggaaactttctgtaatcgtgcaactgaaaacatcatgaaaaataatcctcagtaaagcggtcaactactattttgcaggaacgagcaagactattaatggcaacaactttgattttcctacactatagccagtaacttttccgaaaaggcgaatgtcaattgttcaaatcttcaagatcattattcttacaaatctaatctcttttagataaagcatcccatcagaccaactttcagtaaaagttactgcaaaaccctacagaaaagatttactggttcatataatgcacacctttaaattgataactgcaactctaccacccggcattgtatttttactctccatcccccaagtcaatgacttaagacaaggaagagccacctgtaagacaaagtaaatcaagttactgaccaacaccaatagaatcaaagaaataagtctgtgaaaggtttcctctgggtaccatattctcaggagcagtatcatctcggtgaagtgacactggtgccatacgcggcagattcagatcagaaacagattgagctctggccccaccatcgttaaggttaaatctgcgtatcatttcatcctggcgcggccacagcaaaggggttgtgtcagcagctgatagagaggtcttgtcaccactaccaattccaccaccatgtgagctaggaggcgcagctctacctatccttttcctgacaactgaaaccttctttccaccttctctgagttgccctaaagcaatattataagcttcagctgtaattgccccttcctcagcatacttgatggcttcgcgacataaatgattatagcggtgtatcgagctatcatgcccattttcactgacatgctcatctaactctaccatgctcttggcatttcttgtccaccgtctcaaaatataatgtggtggcaaagtgagtatattagtgacagtaaacaccgtcaaaacatgtcggcagagtatgccggagtgctcaaacatttgacagctgcagtttgctctcatttcagggtagcaaaacgttactatataagctttgttgtcattttcaaaatttgcaaccctaaatgtgctggtagtaccatcatcttcaattctgtttgccgtgtgagcgaatgtctctaccaactcttcctggaactttccaaatattttccttgtaaagagatttgcagcctgattctccatgggtgatggcgtcttcaagactggaggtgtgttgacagtgtcaagatctgcttcaatctccatctcgaaccagctctccatagccctttcgtacagcctaaagaacatcggaagggttgtctgctgattcacatatccatcgaaaaaggaacccgaataaccttggctaggaaacactgcagcaaaaaacgaatcccggaaataaacaggtacccactgagctcgagcattatataaagaattaagccattcatgtcttcctaagtcatatttgtcaatgacagaactccaggacgattcaaactcctcaatcgtttcagtaaagttgatacaattatatagctccacctgaaaactaggatacgcaagacacacatgagccagcttttcctgaccttctcttagcacatcccacttattaatacagtgacgagcacctggaaatacctgaccagcagcaatctgtatggctctatcttgatcagtcaccaaagaaaccggcggttgatctctcattgctgttagaaaagtcttgaacagccagataaatgaagtgtctgactcgtccaaaataagtgcacagccaaataagatagcctgaccatgatgattcacaccagtaaatggcgcaaaaggaacacgaaactgattgcacctgtacctcgtatctaaggtaaccgtgtcaccaaaatgagtataagcaaccctagatctcgaatcagcccaaaacacatttgacatctgattatcttcatcaagctgaaccgcatagaaaaagccaggattctctgcctgcatcctcttaaaatactccaacagattatgtgcatcccgtccaatcgttctcttcgtgtttgtagccatagacgcatttctagctcctctgctattagcatccatagaaacatacatcataccactaggcacattaaccccttcttgataactagatttctccgagttagcaaaatgcctacgaggacgaagacaatgaagcatattagaacttgctaatccatgagtatgctctttaacaaactttgtaacaacccatttctcatgaccttgcaactctatcctaaccattgcatcacaactctcagaaagccttctctttgaccttttactactactactacacacaaattctcgaacactaacagacccatcagttctaggaagaagcttagaagtaaaaccaagctgcctcgagtactcatcatagaaagatttagcttctttttctgaattaaactccataccaacacatggctctgcaattccaatctcatcttgcacccctaacgagttatccatgttgttctgtccactgcaatcactaggttcaacatctccttcatctcctatctcatgattccccattgacacattctcttccaccaaatgaacatccataaccttcacttagtagagaagttctaatttcacacaaatgtttctcatcttcatagtctacaaaaaagtactattagtgtttggagatcttcttccgaacatataaatatgaggactttttgcatctctcactctccgattgtttgttgagagagagagaaacccagaaagaggagaaagcaaaagagagaaagaggagcttacgtcagtcagtgatgcgaagaactcagaactcagaagaatcgaaagtcgtgaaattagggagaagggcaacaacaattggggaaaattgagaagaagctatggcagctatttcgttttcagattcgaccggaggaaattaaactcctgcttcttctcagtcgttcgcgaggaagaagagattcaagcacgaaaccgacgtcgtttcgtgcttttgttggtttttttttttcaatttaaatagcgagacctcgttttaatctaaacccaacaacagaaagccctcataaaaagtgaggcctcatttgaaccgaacccaacaaccaggaaagcccttgatacaagagacaacgcgcgcgaaagcatttcatcttcttcatctgtcttttttagttgagccctaattcattttcggatgacaacttcatttccttgtattgtcgtcataagaatctcaggttctagatgattctctcttctcttatttgatctggttccatctcttcaccgtaccagtgtcaatcacgaatccctttgttttgaaccctaatttatttaatacgcaacacaagcaatcaatacaagagtctcttagcatcatcggcgtgggccaaatatgagcggaaggagatgtgatcggaggttgaatgtgcagaaagtttcagcggcagatgaactcgaaactaaacttggatttgggcttttctcccaaggggaaacgcggctcgggtggctactcacgtttgcatcagtaagtcacgttttgtgacttccctagtagttagttctctgaatactgaaaacttctaagtacactcactgattggttattatactacgttgttggcagtcatcttgggaagatgccgatactgggaaaacctttagttgtgtggaccttttctttgtcactcaggtcagctgtggtcattgctactatattagcttctttcttcgtatcagttgctcaaccctttttgtttctttcaggacggctcttcttttaagactaagtacaagttccgcccttacttgtatgccgccaccaaagtatatatgttctctctgtactcgagtgttttcttcctatatgtcaactaaactgcaatgccctttttacaggacaatatggaactggaagttgaagcctacttgagacgccgatatgaaagacaagttgctgatattcagattgttcacaaagaagatctttatcttgtaagtcactaaagcataactccttttacgcagtttgcaactacctgttgattactcgtttctttctctctatatagaggactcatgtcaattacatttgctacaacttttagttattttcctcttcttgcaacttcaaattgagcagctctagtaataagtccaaaactgatcttgcttccatgtgctcaaatcatctatctagcctgccaaaaacgttcttgtaactcaaaaaacgtttgctagtaaatgtttaagtgtttaatgcttcttctttagtggcaacattatgcaagatatgaacgttttcagtacctcttgtttggttgtcacttttgctgaccttttctttgacctaccataccaatttgagtttcttgatttcttatgttcatgagcagaaaaatcatctatctggcctgcaaaaaaaatatctcaaagtatcatttgacactgtgcaacaattggtggaagtaaagagggatctgttgcatattgtcgaacgaaacctcgcaaaatttaatgcacttgaagcttacgaatccatcttgtctggaaaacggtaaggcaatgtatttttgttcttataaatttccagagttcttacaaatttatcccttaaaactatgttgttccttagttataatttccaagtcttggaatgtagagaacaacgtcctcaagactgcttagactctgtggtggacctccgcgagtacgatgttccttatcatgtccgatttgcaattgataatggtaacctatttagtcaaacttttaatcctagtttagccctcaaggttgtcaaaatcatgatgtgttctcgctgtccagatgtgcgtagtgggcaatggtacaatgtcagtatttccagcactgatgtcatactagagaagaggacggatcttctccaacgcgcagaagttcgcgtttgtgcattcgatatagagacagtaaagcttccattgaagttcccggatgctgaatatgatcaaattatgatgatatcctacatggttgatgggcaaggttttctaattactaacagagaggtaactgctgcatacatttgtattgcattggatttgatctaatcaatgatgatatattacatgatggatgatgaccgtttccaaatcataaacgtagataagctgctatatagcccttatgtgaatttggattattttgattgcattcttaatccaagataaatcagatatgatccatacgaaattatcccgcttgtttgattgattgatgtgtgactgtaagacttattgttgtggactaacataacgttttgctatgtaatttaaaacatgaattttttttcttaacaattttccattggatatatcatctctggttgatatctcagctctattatttcttttaaatatttgggccacttcaatcttgtttgataaaatttgtagtattaactttgcacttcttaattcagtgtgttggcaaagacatagaagatctggaatatacacccaaaccagagtttgaagggtatttcaaagtcacgaatgttaccaacgaggtaaagtaaattagctcttgatttgaatatttgtatcagaaagattgaggtgcttagaattaagttactttcttggttttgatttgtataggttgaactcctccgaaaatggttttctcatatgcaagagttgaaacctggtatttatgttacatacaacggtgacttttttgactggccatttatagaacggagagcatctcatcatgggatcaaaatgaacgaggtatcacgtttccttcactgtggtattgctaacaaaatattctgtctgcatcaaatatatgatctacttgagaaattctttgtgacattattcactgatattttgttgtcaccttgtgaatgtgcctctgcttaaaactagattagtaatgtgttttgcgtttgaattctgaagttttcttagaattggcaaggtggcactcatctaccagacctcggttctatttcccatccccagggcataatgtttttttttttccttccatcgtggttgcaggagttgggattccgttgtgatcaaaatcaaggtgaatgtcgagctaagtttgtgtgccatttggattgtttttcttgggtgaaacgtgatagctatcttcctcagggaagccagggtctgaaggttcattctgtttctttcttttcgccattatttttcttttgtggaggaattcatattatgattctgagtggtgcttgcctcttaactaaatgccaggctgttacaaaggtaaaactgggttacgatccactggaagtgaatcctgaggacatggttcggtttgcaatggaaaagccacaggtattgctgattaattaataaaatgctatttctgtgtgacaaagttttttagaatcagagctagttgtttgatggcgctggaatgggctagagtaacatattttatcaagtaatttaacaaaacatttaacaacggatgctgtagttgtgcaagatgctgcatggaatttggagcttatatgttatttctgtttcatgttgggaatcttgttgcagacaatggcctcctactctgtctctgatgctgttgcaacttactacctatacatgacatatgtccatccgttcgttttttctctcgcaactatcattccaatggtccctgatgaggttttacgcaaagggagtggcaccctttgtgaaatgcttttgatggttgaggtgacttcctatctactacaaagatgttctgctgtgtggctcattctattaattggaaatatttcattcccagcacaggcttacaaggcaaatgttgtatgtcccaacaaaaatcaagctgaccctgagaagttctaccaaggtaaacttcttgaaagtgagacatatattggtggccatgtagagtgcctccaaagtggtgttttcagatctgacattccaaccagttttaagctcgacgcatccgcataccaggcaagttatcttctttataatttacttaataatgctggttgctgaacaccacttttttgtttcaggtgagtttaaagtaatctcatataaggtggtgcagtttatagtaaaacgtttctagtctgtaatggatgcctgaggcaaaaatgctccattttcttttgcgcacgattgctaatatacgcacctatctgatattggacactttgattgccagcaactgatcgataaccttggtcgggatctggaatatgctatcactgttgaaggaaaaatgagaatggattcagtttccaattttgatgaagtaaaggaagtaatcagggaaaaggtaatgaattcctcttctgaattaggatagagatttaatgctcgttcccttgtttctcttgtctctttgaatgggtgacaatgcatgcgcatttcaatctgggagagtttgcctatacactctaagaacctagtaagtccttagactactattgtttgggcctccagaagaaatgtgtttatcaagtgtccttcacctacagtagttgtcacgaactagacatctgcatgctttgatattgtaaagcagaccatagaaccttctaggtttcattattgatctctgcagctcgagaagttacgggatgatcctatacgtgaagaggggcctcttatttatcaccttgatgtcgcggcgatgtatccaaatattatcttaacaaacaggcttcaggtacatcaaatatcacttaaatgattgtgttccatgtacaaaagaatcacaatcattacttttaagattacaaagcccgcagatatattatgttaagtggtaggtttcttcttaattgtcagccaccatcaatagttacggatgaggtttgcacagcatgtgatttcaacggcccggaaaagacctgtcttagaaaacttgaatgggtttggcgtggggtgacgttcaagggaaataaaaggtttagcttatattatattccagctaagtatggatttaaaccttgttgatatagtcttaagatcttaaatttgttttcaaatggtttgacagtgaatattaccatctgaagaagcagattgagtctgaatctgttgatgctggagcaaatatgcagtcttcaaaaccttttcttgatctgccaaaggtggaacaacaatccaaattaaaagaacgactgaaaaaatactgtcaaaaggtactcttctctctccctttcataataatattctccgtacagtgtcaatgtataacggtaagtgtcattctgcttttggcaggcatatagccgagtacttgacaagccaatcactgaagttcgcgaggctgggatatgcatgagagaaaacccgttctatgtggacactgtgcgcaggtgtgtggcttttgttattaccaatcttattcttgattgactttctgtttggacgtttagtctttttgaagcaatctcttttgagggagtatacaagtaataatggtgaaactttagccaagtcctaattacttttccacattgctgttttttgttttttttcaaatttttattggtgtaattatagctttcgagataggaggtatgaatacaaaacacttaacaaggtctggaagggaaagttgtcagaggccaaggcaagtggcaatttaatcaagatccaggaagcacatgtaagttatatcttatatccttggaacttatttttgactgatggctatctgacataaaacttgtgcaacaggacatggtagtggtttacgattccttgcagctagctcataagtgtatacttaattccttttatggatatgtcatgcgaaagtgagccctctgatttcttgcaaagagcctggaatttacataatctttttgtattttggttgacctgaaacctgataacaggggcgcaagatggtactccatggaaatggctggggtagttacttatactggagccaaaatcatccagaatgctcgtttgcttattgaacgaattgggaaaccacttgagctggatacagatggtatatggtgtgctctacctggatcttttcctgagaactttacctttaaaaccatgtaaggatttagatgtttttatgatatgagatatttgaaagagttttgtattttccatatcttttaaggcggaattacgtttcttgtcaatggttttttgtttattgcagagatatgaagaaattcaccatctcgtatccgtgtgtaatacttaatgttgatgtggcgaagaataattcaaatgaccaatatcaggtatcccgatctatacatttcctaaaagtagtttttgaatgatataacaaacaagttgagtttctgaaagctttttgctttgattattggttttggaacagactctagtagatcctgtacgaaagacatataattcacgtagcgaatgctcaattgaatttgaagtggatggaccgtacaaggtatgccttataaatgctattatgacctttttgacaaaaataatatctctaacactctacatccaggcaatgattattcctgcatccaaggaagagggaatcttaattaagaagcggtatgctgttttcaatcatgacggaaccatagcagaactcaaggggtttgagatgaagcgtagaggagagctgaaactcattaaagttttccaggtatcattggctttttttattggattcttgtgttaacaagcttattaaaaatatggactgcgtaatgtagtaagacgttcatgatttggtagtataccaagaaaataagcagagtttgacttgataaatgtagtgtctcaaaaacttggatgtcagctaagtttgttcttttcctttaattttactttatacttgatggatctttcgtttttctacaggccgagctatttgacaaatttctgcatggatcaacccttgaagagtgttattctgctgttgcagctgttgcaaatcgttggcttgacctactcgaggtatatctaatatcttgagaaggaagatttatttcttctttacaaccgtgttattttgctcacaagttttccttcacattttcttcagggtcaaggaaaagatattgccgatagtgaattgctagattatatatcagaatcaagcactatgagcaaatcgttagcagattatggtcaacaaaagtcatgtgcagtgaccacagcaaaacgcctggctgattttcttggtgatacaatggtcaaagataaaggactgcgctgccaatacatcgttgctcgtgaaccagaggtacattttctgtcaaattttaaaggaactttttgtcctttaggaagttctcttggttaggaacgctgctgatatttacatgatctcttattcaagaatgttgctcacgtctcagtattttactgcatcttgctcagctattctagcataagtgtctcattcacactgttcatagtatctttaactcttatgacttaccagtactttttcatgattaggggacacctgtaagtgaacgtgctgtccctgttgccatatttcaaacagatgatcctggtaaacattctgttgtttgagtatgtattgttgcattcttaacgttcaaatgtgatgtaactattctaataaatttacagaaaaaaagttttatctgcaaaaatggtgcaagatatcatcatatactggaatccgttcaattattgactggatgtattacaagcagcgtcttcattcagctattcaaaaagttattaccattcctgctgcaatgcagaaggttcattgtgactttactatttttatctgtgtctttgtttagtgttaaaaaacatctaaccacttatatgacctctataggtggcaaatcctgtacttagggtgcgtcatccttattggctcgagaaaaaggtctgtgacaaatttcgtcagggaaaaatagttgatatgtttagctcagcaaacaaagatcattcgacaactcaagataatgtagtggcggatattgaagagttttgcaaagaaaacagaccttccgtaaaagggccaaagccagttgcgcgttcatttgaagtcgatagaaatcactctgagggtaagcagcaagagagttgggatccagagttccatgatatctcattacagaacgttgacaagaatgtagattaccaaggatggcttgaactggaaaaaagaaaatggaaaatgactctaacgaataagaaaaaaagaaggtactcctcaagtttatttggttttgatttggaacaaaatgtagatcaataaatatactcttactgtgtatctcttccttgtgtaggtttgatgatctaaagccttgtaatcagattgatgcacacaagataaataaaaaagtctgtaagggaagagtaggtgtaggctcatactttaggaggcctgaagaagctttgactagttcctatttgcaggtatgcatgacatttggtaagacctcattatgtttatataattggcaaccatgttaaatgttgtctttccgagtttctcagataatacagttggtccaaagtccacagagcgggcaattttttgcttgggttgttgtggaaggattgatgcttaagatcccattgacgatcccaagggtgttttacattaattccaaagcttctatagctggaaacttcacgggaaagtgtatcaacaagattcttcctcacggaaagccttgttacaatttgatggaggcacgtcatttacacaatacacatatcttgcttcttgtatttcttctagttagttataagttttctttatttctttacaggtcaatattcaggaagatcaatttataaaagaaagcaaaaagcttgccgctctacttgcagaccccgaaattgaggtgtgtttattaccattattattcagaatcccaacctttgagttctatcgaatacccttcacatgccttgactgttaaacaagaaaaaacctcactgttttaacgattttgactttggcagggcatatatgaaactaagatgcctctggagtttagtgctatatgtcagattggatgtgtatgcaaaattgaagacacggccaaacaccgtaacacccaagatggatggaaacttggtgaacttcacaggataactacaactgagtgtcgctacttggagaattctattccacttgtttatttgtatcacaggtagagctgagttctacttcttcatcaaggaatgtcttgcttgtgatttttttttgtctcttttattctttgggcatatgctatttggcttcatttattggattccctaatatcttatattatggtttccttgtttttgcagcacctcaacaggtcgtgctgtttatgttttatattgtcatgcttcgaagcttatgtctgttgtggtagtcaatccttacggtgacaaggaattattatcatctgccctagagagacagtttagagatagatgccaagaactgtcacctgagccattttcttgggatggtatccttttccaggtaagctctaaaatatacgataacagtcctgcatttttcaagcttgtctaatgctaatcatcaggtcgagtatgttgaccatccagaagctgccacgaaatttttacaaaaagcgctctgtgaatacaggtaaactcatttccctgaataaaatagtgcagcacgttttacgaaacccataatttttctaatgctgatcagttgggcatgctttttccaattgtaatttgttcctgcatgatctagttcttcttcattagaaaaattcagcaagttaattgtcaaaaaaaacaaaaagagtgtgacaatgacggattttggacttctctaagacgctcatgtcggtctggtttgaatttttcccattgttaccttttcctgcagagaagaaaattgtggagcaactgtggcagtcattgaatgccctgactttaacaccacgaaggaaggtgtaaaggccctggaagatttcccatgtgtgaggattcccttcaacgacgatgacaatagttatcaggttccttgacttatcaaccaatcggcttcattcttatgttatgatgaactttaatttgatcaagtaatgctaaatatgtacgtgttgtgatgcatatagcctgtctcctggcaacgtccagcagcaaaaatagcagtgctccgttgtgcttcagcaattcagtggttggaccggaggattgcccagtcaagatacgcccatgtaaagtggaaatgtacttcttcatattagtgtctttatgcagttattgatatttcctaaacaactgactaggtgcctctggggaattttggacgtgattggttaacgttcacagtagatatcttcctgtccagggcactccgtgaccagcaacaggttctttcttccactttctgtccagataaagagttccactaatcttgatctgtgcctccacagcttcaaaattatatgacaaaaggctattctctctgtatcactgatcttttttccatatcattgaatttggtattgtattacaggttctttgggtctcagataatggtgttccagaccttggagatataaacaatgaagagacatttctagctgatgaggtatgtcatcaaattgtttatattttttctctttttcgtttatgtgaatttttcttttctttgttacagttacaagagacaagtttgctattccctggagcgtacagaaaagtgtctgtggagttaaaggtcatataaccctttttccttaatcgcgcgtgctttttggaattttatcctaaacaacatatatgcatcatgcaggtccatagattagctgttaatgcccttctgaaaagtgacctggtgagtgaaatggaaggaggcggctttttgggtgtgaattctagaggaagtagcttaaacgataatggcagttttgatgagaataatggatgcgcgcaagcatttcgtgtcctgaaacaattgatcaagcgcttgttgcatgatgcgtgtaattctggcaatatatatgctgattccattttgcaacatctgtcttggtggctccgcaggtatcattatatcatattcaatttattcttgacttgttagataccaatcagtaatttcatattttacgtagcccttcctcaaagcttcacgatccagctctccatctcatgcttcacaaggtaaatgacatttgatgttttgtgcttttaatatggtataaataggttgtctgaatctttctctatcaactcatttagtcgaatctgtagcttacaagttatatctccttgcttcagtatccctgtcataactcataatttcctaatccacgtcttttgcattcaagatttcttaatccatttgacatattgcggtttttctcaatattgtaggtcatgcaaaaggtgtttgcgctgcttttgactgatttgcggaggttaggtgctataataatatacgcagacttctcaaaggtcattatcgacacagggaaatttgatctatctgctgcaaagacttattgtgaaagcttgctcacagtgatggggagtaggttggttttcttcatccccagtatatacttctatgactaaatctctaatggacatcattttcatgtcttacgctttgccaccgacagagatatctttaagttgatcttgcttgagccggttcactactggcactcgttacttttcatggaccaggttggcgttcttatgtcttatacttcgctcttgtattatcttttcaactacatggttaaatgaactacaactgacaagtaaaatctactagttttccatctaccttcatgagttcttgtgttacctttttcatgatatttttctcttatcgtgacaaaccatttccttaacattgtagcataactacgctggtatccgagctaccggagatgaaatttcaggtaacgaagttactattgaaccaaagtggagcgttgcacggcatttacccgagtatattcaggtttgcagacagatgatccctaatgttcattattaagctaagcggcgtggaccatttcatcttgaacgctcatgcatctcatctatcttggcagaaggattttatcataattgttgccacgtttatatttggcccctggaaatttgcattagagaaaaaaaggggcagtgcagagagtttagaggcagagatggtagaatatctcaaggaacaggtacccttaaaatcagtttacgtggttttttgtttcattcactcaaattttttgcctaatatatatatcttcactttatgcagataggaacccggttcataagcatgattgttgagaagattggtaatatcaggtcacacatcaaggatataaacgtgtcagatgcatcttgggcttctggtcaagctcccaaaggagattacacgttcgaatttatacaaattattactgctgttctggctcttgatcaaaacgttcagcaagatgttctggtatattctccatctttacctgatgctggttcagttggataaccatatggattcacagttgctatcaagtctgaatgaatctctctcagtttttggtttctcattgaagcattgtttgtctttatggtctgagagcctctctgtatctgatttcattcaccattccaacctaaacttttggaaatttggttctttggttcttgaaactatgtttagcagtaaagctggataactgatttcttctgtgtaggtaatgagaaagattctgttgaagtacattaaagtaaaagaatgtgctgctgaagccgaatttattgatcctgggccatccttcatcttacccaacgtggcttgcaggtattcttagcagctgtatgcattgtgggtgatttgctacatctaattaatagataaatagctttctgaagtccacttttcttcgagccactagcttattagaataacaaaaatcccatgctttagagagtagagacttccttgcacacccctttctgtgatcgtggtgtaaccactgaatcccagacaataatgtacttgtacttttttttttagtctatcaaaggcatacctattgtgtttcaaagacttgactctcttgcaggagtaatcagtaagacagctgtgaatgcctattgttaattttctcttttcttttctcgttgcagcaactgcggtgcctacagagacctagatttctgcagagactcagctctcttaacagaaaaagaatggtcatgtgcggatccgcaatgtgtgaagatatatgacaaagagcagatagagagtagcattatccagatggtgagacagagggaaagaatgtaccagttgcaggatctagtgtgcaataggtgcaatcaggtgaaagccgctcatttgacagagcagtgtgagtgttctggatcctttagatgcaaggagagtggttcagatttccacaagaggattgagattttcttggatatagcaaagcgccagaagtttagactgctagaagaatgcatctcctggattttatttgccaccagctgttgacaaaacaatacacggaagacagcattcgtgtatcagtaatatttaaaatggaaaacttctgacataattaacaaagccaaaaaatattatgattaaatcgttctttccttttgcacaattgttcaagcttaattacaaacaagtcattacgaacaagacttttgaacatagaaaacaaagccaatgaaaacttcatttcagcataagctataacataaggactgataatcttaatgaaagagcaaaaaagaaaagccaatgaaaacttcatttcagcataaattcagtcttcaacagtttctattatatgttgtcagttggaaacaatcatcatattccaaagtatattaggagaaataaacatctaccgtcgagctttgaattcttggttatagcatttaaaactaattacttcaaaatctaaaagaaatgtgattttttgtgttgctagttttaaaaacttgatacgtaaaatcgatgaataaacataattatatattatattatgttccaaactaatccatgagtagaatcaattactctaaacagatgaataaaataaaaagaggaggattagttcattctagccatattcagtaattcagcttttctcattaagacaactttaactaaaatgctattgaagttaataatttcgagaaaaatccattttacaaatagccaaagacagaatatataataaagacatttcttctaacttcactttaaagttaaagtggtgtttattcatcgggaaggaaactgtgtggctgatagaattgcaaaagagtccctttcgtttttgaattatgactctaaattgtattctacaatgcctctttgggttaaatcctttgtggattcagatacaatgtaatctttcattagttaatgtttaagtttgaagttgagccaaaaaaaaaaaaaaaaaaaaaacttcactttaaagttaacttgtccaaataaaattaattccccattccaaaaaacattgagtgcaatctcagatcagatctaatcacattccaccagatgctcaccaccaacactctcgccgtcctcctcctcctcttcctcagtctctgctccgggcagtcacctccggcaccggaacccatcgccgccgatggaccttcatctccggttaactgtctagtatctatgctaaacgtatcagactgcttctcgtacgttcaagtgggaagtaatgagatcaagcctgaagctgcttgttgcccggagcttgctgggatggttcaaagttcgccggagtgtgtctgtaatctttacggcggcggcgcatcgccgcggtttggagttaagcttgataaacagagagctgagcaactttcaactatctgtggtgtgaaagctccatctcctagtttgtgttcaggtacatttactcatttggtacacctactttttctatgtaatttggactgtccgattcgattaaactcaatccaacggcttagagatatacctgacagttttgtaattaattaattgattaatcatttgtttcgttcattagtaaatgtttgcaaagtcttgaaataggaaataattgatagattgagaaggattaaactaaaaatcagtcctttaattaactcaaataaatataacaggcaataaatttaaattttacatctctataataaaacaaagaaggaaactgttgagtctttggaaataatttttgttttctttaaaataataataataatttttgttttcttggttaatagttttaggttttccgacgatctcgccggccggaagtgaagattcatcttcaggtagacttatcattttcatattcttaaagtcatatataagaagtactcaagaactaactgaagatcgagatttagtttgtcccaattgattatctcttaataacgttagctaggtgataaaatttcaggttctgaaggatcggataaagataagaaaaatggagctatgactactaaatattgtggagtagctttgaactcattagccttactattattgttcacgtttctttctttaagttaagcaatacataacctcactaggtgataggtgatgaagcatatattatactatcttctccttttttgtaattcatcgtacgaatctcatatgtgtttcttatggaacttggattctattacaactttatatatagtttattgagcttaagttctgggtgttattcaagctaatttctgactacatagcaatgcaacatgaagatatgtctgaggccgagccagccgagacaatttcaattctaagattctgaatctttctaaatataactcaaaatcgaaccattagttgagtttttgtcttctccaataacaaagtttctcgtgttaatatatattataaattttaatattgcatacatatatctttctcagtcatacgctagaaatcttaaaatttatataaatttggatggaatgaagaaagatgtagatgatggacttgtaaaatatgtaagggtgaagaattccaatcaagccaactagacaaatgaacttttatgatcgaataagaactaaacatgttgtataagtatctttatacattaacacaatattattatgttttatatatatatatatatatattgtaggaatatgtactctaatttttttgttttataattatatgcttcttgatatctatgagcctttttacaatgtatatatacattaccaaaggtttttaaaaaattgaagaaacacttttttgttatataaattatatagtttgagagaagagaacttgatgatctaaataattactttttaatatttgacaaccagatatgatataagcataatttatattattacataaaacaaataaactaatttttattgaatatgtttaaagagaaatatcataactctgaaggatcaaaacttccaagataaaacatctatatatacaatttttgcagccattttgtaaaataaatcctggagttggaacttatttacaatggctgtcactggcttttatttatttattttcttttggcaataaattgattaacaaagaaaaaatatttcaaatatattccaatcccatatatcacgcagatttctccaaaatttgaattagatttcggaaattatttaaaacaaaaaatatttgacaaaccaaaatacaattgcaatcccttaaaatgagcaaaacgcacataaatacatttcttatcagttcactaaatcttatttctccaatatttgaattaaatttcgacaactatttaaaacaaaaatttgtttgacgaactaaaatataattgcaatcccgtaatttttttttttaaattagcggtgtactacaaaaaattttaacgggacgggtttggcagaacgggtttggaaggatgttacttaataacaattgtaaactataaaatataaatattttatagataaatataatttacagacttttatatatactaattttaaaaaataattgtctccgcggtgtactgcgggttataatctagtgtttcgtattgttggactatacaaaaatgaagctctaacatatttcgtagaacaattttggtaaacaaaatttataatttaacatggctgagtgcaattaaacagatccatatataacaacaattttttttataaataaaaatttataaggaacatgtaaggtcttattttacttcaagtttttgtagataatgagacaaatttaaaactcatagtcctttcaaaaaaattgtgtgagagattagaaaaatatgcactatattgtacttccaagttccaactatgaagatacaacaagccctcaacaatatgctttataaatttatgtctcatttcccaattcaagaaatggcttcgaattccacatgcaaaagtttattattagattgaaatcattttatcaagtttatagctagcatagaaaagagtgtaaaaagtaaaaactaactaaaaatataattacttaagctagcgttttctgaacaacattattttttttgaacaacattcttttttttatgttggggtgttatgtttattataatgatttgttttatatgcaaattttagtacattttattttcctttgagaatcatgcaaataggtaaataagaattaagaagtaaacatttggccagcatagaatccaagagacagcaacagaaccgcagctgcgggaacaaccacaccagccgtaagtgctgttctgttattcttcatcagtgccacatatcctccaagattctccttgtattcattcactttacttctgtaatcttggttaagagcttcttcgttctctcttgctggctttggtgattgaatcttctcggcctgtttttctagttccgtttcattctctcttgtttcctttggtggttggaccttttctttcgctgacgggctaggaaggttggggttttctttaggaactggaggaggttttgtggctgtaccaataggtgaaggttgtttgcccattggctcggttctaggaagcctcacaacgagatttgcgccttcgaatttggcagagacggagtcgacgtcgatgtttggcggaataggaaactctttgcggaaacggatccatttgttggctcctgctggacgatctcccatcactctcagcttcctcgtggtggttacttgcaccttaagctgctctttcctaaaacctgtttatttcaagaaccgttacacaattcaagaaccgattaataaaccaaaatcaaaacgagaacaatgctagagtttgttgagaaatcaaacctggaaggtaaatagtgagagcttcgaatccttgttcagttttccaatttgagagtggctcaaattcatcgtagatgcgattagcattagcatgatcagaaattctttccatcttttataattttcttggtttgatgtagaataagaggattttgtgtgtatgttgatacaagagagtatctaagcgatttcattatataccaaagaaaagatgaattttctaagttgttttctttgatattgggttattccttaactttgcctatctattatgattcctttctataaagttctttcctttttatatgcatttttacaactttattttccaattctcaaaaaagtgaagtaaatgaaattttaaaaataggagaaatgctttgctttgtggagatggcttcatgtagagaacaaataacaagtttatgttgttgttaatgtatctcctaagtttattagacaacgtgcaaaaaacatctacaacaacaaacccaatttcacgtctctcccaagcattttactattaagaagatattgttaagtttttttttttaaatgaatgttaaatttaatcaaccaaaaaaaaaccattgtacaatatatgcatccttaatttgaatgtttataaaaatttaactagactttagagcaaaaagaagaagacacttagagattagcttcttaagtcgaaccaaacccgcagaccatcttcaagctt

SEQ ID NO: 290 - DNA, 20190 bp, Arabidopsis thaliana
gaattccaatcaagccaactagacaaatgaacttttatgatcgaataagaactaaacatgttgtataagtatctttatacattaacacaatattattatgttttatatatatatatatatatattgtaggaatatgtactctaatttttttgttttataattatatgcttcttgatatctatgagcctttttacaatgtatatatacattaccaaaggtttttaaaaaattgaagaaacacttttttgttatataaattatatagtttgagagaagagaacttgatgatctaaataattactttttaatatttgacaaccagatatgatataagcataatttatattattacataaaacaaataaactaatttttattgaatatgtttaaagagaaatatcataactctgaaggatcaaaacttccaagataaaacatctatatatacaatttttgcagccattttgtaaaataaatcctggagttggaacttatttacaatggctgtcactggcttttatttatttattttcttttggcaataaattgattaacaaagaaaaaatatttcaaatatattccaatcccatatatcacgcagatttctccaaaatttgaattagatttcggaaattatttaaaacaaaaaatatttgacaaaccaaaatacaattgcaatcccttaaaatgagcaaaacgcacataaatacatttcttatcagttcactaaatcttatttctccaatatttgaattaaatttcgacaactatttaaaacaaaaatttgtttgacgaactaaaatataattgcaatcccgtaatttttttttttaaattagcggtgtactacaaaaaattttaacgggacgggtttggcagaacgggtttggaaggatgttacttaataacaattgtaaactataaaatataaatattttatagataaatataatttacagacttttatatatactaattttaaaaaataattgtctccgcggtgtactgcgggttataatctagtgtttcgtattgttggactatacaaaaatgaagctctaacatatttcgtagaacaattttggtaaacaaaatttataatttaacatggctgagtgcaattaaacagatccatatataacaacaattttttttataaataaaaatttataaggaacatgtaaggtcttattttacttcaagtttttgtagataatgagacaaatttaaaactcatagtcctttcaaaaaaattgtgtgagagattagaaaaatatgcactatattgtacttccaagttccaactatgaagatacaacaagccctcaacaatatgctttataaatttatgtctcatttcccaattcaagaaatggcttcgaattccacatgcaaaagtttattattagattgaaatcattttatcaagtttatagctagcatagaaaagagtgtaaaaagtaaaaactaactaaaaatataattacttaagctagcgttttctgaacaacattattttttttgaacaacattcttttttttatgttggggtgttatgtttattataatgatttgttttatatgcaaattttagtacattttattttcctttgagaatcatgcaaataggtaaataagaattaagaagtaaacatttggccagcatagaatccaagagacagcaacagaaccgcagctgcgggaacaaccacaccagccgtaagtgctgttctgttattcttcatcagtgccacatatcctccaagattctccttgtattcattcactttacttctgtaatcttggttaagagcttcttcgttctctcttgctggctttggtgattgaatcttctcggcctgtttttctagttccgtttcattctctcttgtttcctttggtggttggaccttttctttcgctgacgggctaggaaggttggggttttctttaggaactggaggaggttttgtggctgtaccaataggtgaaggttgtttgcccattggctcggttctaggaagcctcacaacgagatttgcgccttcgaatttggcagagacggagtcgacgtcgatgtttggcggaataggaaactctttgcggaaacggatccatttgttggctcctgctggacgatctcccatcactctcagcttcctcgtggtggttacttgcaccttaagctgctctttcctaaaacctgtttatttcaagaaccgttacacaattcaagaaccgattaataaaccaaaatcaaaacgagaacaatgctagagtttgttgagaaatcaaacctggaaggtaaatagtgagagcttcgaatccttgttcagttttccaatttgagagtggctcaaattcatcgtagatgcgattagcattagcatgatcagaaattctttccatcttttataattttcttggtttgatgtagaataagaggattttgtgtgtatgttgatacaagagagtatctaagcgatttcattatataccaaagaaaagatgaattttctaagttgttttctttgatattgggttattccttaactttgcctatctattatgattcctttctataaagttctttcctttttatatgcatttttacaactttattttccaattctcaaaaaagtgaagtaaatgaaattttaaaaataggagaaatgctttgctttgtggagatggcttcatgtagagaacaaataacaagtttatgttgttgttaatgtatctcctaagtttattagacaacgtgcaaaaaacatctacaacaacaaacccaatttcacgtctctcccaagcattttactattaagaagatattgttaagtttttttttttaaatgaatgttaaatttaatcaaccaaaaaaaaaccattgtacaatatatgcatccttaatttgaatgtttataaaaatttaactagactttagagcaaaaagaagaagacacttagagattagcttcttaagtcgaaccaaacccgcagaccatcttcaagcttgcgtgagccataccgtaatagttttttattccaaaaatatagtattcaaattagtccttatttcactagaaggcagaagcaatatatattcttcatattcaaagttggaatcattacaaatttccaagttacgtatttctatcataaagatatatcttcttctttttttgataagataaagatatatttttttttgttaaaccactacttaaacacgcatattacaatgtttaaaatcaatgctatagcttcacaacttctcaaacgtatattcttattgttaattaaataaaaatcaagttttatcataaatagaaacaaattaagagcaaaaatgatagcagcggcaggtcttaggaggcaggcaaagactagccacgggcttcttcaacttctcacatgcagatttacattccgtaaaaatacattttccagatttgttaggaataacagtatggcattgttctcgtttcacttgttgcacatttcccattactcctgtttgtgtcatatttagaacatgtcttagtaaatgttaccatcacataattatgtatcgaaaagcaattgttacatagattttacataacatatatagactatagctgaattgatatttttaacaaaattgtatagttgacagaatgaccttttgaagaagtatcacaatactgtcaatatatatatatcacaatattcgttattatttacagttgaaatatatatttttaatatattaaggcgaatttcaaatgtaaatacaaacctaactcaagaaggatgaaaaacgttagaatgatgagtgaaagttgaaattggttcttcatcataggtgttatgaatgaattgatggtgttttgaaagtgataaacaacttacatagtgtactcctcctatatatacttttttttaagaagttctatgtaccttaaaccaaaaaaaaaaggttctatgtacctcacattcaagcttatctaacttgagctatctatctccttaaatttcggttttacacaatttctatatttttctcattctttatgtgaaagctgtagactcgttcgttgttgtaacacaatttcctatttaaataaaaacattgaaatttcacaaagaaggaaaaaaacaaatatagccacacattcatacaatatcaaatctcatatgttatttttaaaataatgtacatgaatagccgtgagtgaaaattatcattgaagaatcggtgttagtcaacttgtagtttatgcacggagtcagatgtcacatgtccagactctagagtgttaacgagactaaaataaaaagtgttaacgagacgactttacacaagtaaaacaacgttattttgattatacaaaatcaagactattgttttagatatttttttgtttactagttaagaaaaatcaagtctctatctcactagtagtagttttttttttgtcggcatcactagtagttttttttttttttttttttttgtcgacgcatcactagtagttaaatacaagttatataggccatggtaagcttgatcaataaaagactacattagtttttgctatagatttgagcaaaaaaaaaaaaaggtttttaaaatagatttctaatttttttttaacttaatagatttctaattttttttctacaaatttgcgttttatcttctttccccacttgaacagaaaaatttatttgtttagcaataaattcaaattaaaaaaaaaaaaaacatttcatttcaatttagtaagattttgattggatcaggttgagatttcttccaaagtcaaatattcttttcccataagactgactcgtggcgcacagtcaatgacttatgacttatgacttatgagttatgtctgaaactcaaacttatagatgtgcgtgaaagaggcgcaactataagagaagctgatatgaaactcttcatcacatctccctcaaacttatttctctctttaattggttaaatctccacacccacttcgtgttttcttgattcgtttcctgggtttctcaaaaatctaaccttataattggaaaaattctggtgtcactgctctgggaaaaaaatggatttggagtttgcagttaatggggaacgattcaagattgattctgttgatccatcaacgaccttacttgagttcttgcgattgaacactcctttcaagagtgtcaagctcggctgtggcgaaggcaaaatctctatctctcttctctgtttttatgttttagttttaattttatttctcaccaactgttataaaagagattcctttatgtccggaaacaatctatatgtgttgttgaagccttgtgttatgtcttacttcttaccagaagaattagtgaagttgacttaaatttagaatccaaatctgagttgtgtgtattgagatagagttttaatgtttgattgaaaatgtgtgtgtatttggttagtgcaggagggtgtggtgcttgtcttgtagtgttatctaaatatgatccagagttagatcaagtgaaggaatgttgtataaactcttgtctcactcttctctgtagtgtaaatggatgttccattactacatctgaaggtcttggaaacacgaagaaaggatttcatccgattcataagcggttcgcgggttttcacgcctctcaatgcgggttttgtacaccagggatgtgtatttctctctactcatctcttgcaaatgctgagaataacagctctaaagattttacggtttctgaagctgagaaatctgtttcgggtaatctttgtcgatgtactggttatcgtcccattgtcgatgcttgtaagagttttgcttctgatgttgatattgaggacttagggttaaattccttttggaaaaaaggagaaagcaaagaggttatgtttaagaatttgcctccttataaccccaaagaccatcttgtaacattccctgagttcttgaagaagaaagagaaggttgataatggttcggatcatttgaagtatcgttggaccactccttttagtgtggctgagcttcataacataatggaagcagctaactctggagactcgttgaagttagttgtaggcaacacgggtacaggttactataaagacgaggaacggtttgatagatatattgatatcagtaacattccggagatgtcaatgatcaagaaagatgagaaaggaattgaaataggagcagctgttactatatcgaatgctattgatgctttggagaaggaaagcaaatcttcttatgttttcaagaaaatggccactcatatggagaaaattggcaaccgttctatccgaaactcgggtagtattggtggtaatctagtgatggcacagagcagaaagtttccttctgatgttaccactttgttgctcgctgtagatgcctcggtgtatatgttaaatggtaggaaaaccgagaaggttacgctacaggagtttcttgaattgtctccggtgttagactccaaacgcgttcttttaaaggttgagattccatcatggactgctccttctggtgatgacactgaatttctctttgaaagctatcgagccgcacctcgttctattggaaatgcattgccttacttgaacgctgctttcttggcgctagtgtctcgccaagaagcatcaagaaaaggtgtaacggtagaaaaatgcttcctggcatttggttcttatggcggggatcattcgatcagggcgatagaagtggagactttcttgacaggtaaattacttagctacagtgttctatatgaagctgttggtttacttaaaggaatcatagtccctggcaaagacaccttgcactcggaatatagaaaaagcttggctgttggatatctttttgagtttttttacccactgatcgagagtggccatagaatatgtagtcttgattcagggaataagcataacaacagccatgttgataccgtaaaatctcttcccttcctctcatcttcacagcaagtattagagagcaatgaatttaaacctattggtgaagcagttatcaaagttggagctgccttacaagcttctggttagttcttatgccgtctgttttcatcatttttagtaacttgatatcggttcaagccacgggtaaagattcaatatagggccttacatgagctttctttttcaggtgaggcggtttttgttgatgatataccgactttaccagactgtcttcatggagcattcatttatagcacagagcctttggctaagataaaaagcttaagcttcagagagaatgtaactcctactggagtttttgctgttcttactttcaaggatattccacaacaaggacaaaacattggttccaagaccctttttggaccaggacctttatttgcagatgaactaactcgatgtgcaggtcaaagaattgctcttgtggtaactccagtttcctcttcttttttaattcttgctcgtatttcgttgcgtatctagagaagtatatggcttttgcaggttgcagacacacagaaacatgcagacatggctgcaaaacttgcagtagttgagtatgatacaaagaatttagaacaaccgatattaactgtcgaagatgcagttaaaagatctagctttttcgaggttcatccgatgttttaccccgaaccagtaggtgatgttataaaaggaatggaagaagctgagcgaaagataatctcctctgaggtatctcaaaactgtttccagattttcaccgccaaagttgtgtagtgacatctcattttgtgtgtttgaaacttggttatttattcagttgaggctagggtcacagtacttcttctatatggagccacaaacagcacttgccttgccagacgaagacaattgtgtcaaggtatttagttcatctcaagcacctgagtacgtacattcggttattgctacatgtcttggcattcaagagcataacgtgagagtcatcactagaagagttggtggtggctttggtggtaaagctgtaaagtcaatgcctgtaagtatttaccataattggtttctttactggcttcttgcacgaatcaagatcgtgaatgctcattaaaattgatgtttcaggttgcaaccgcatgcgcactaggcgcatacaagttgcaacgtcctgttaagatgtttttgaaccgcaagacggatatgataatggctggaggaagacatccgatgaagataaattacaatgtgggatttagatcagatgggaagctcacagcactggagcttacaatgcttatagatgcagggcttgagccagacgtaagtccaatcatgccgcggaatataatgggtccgctgaggaagtatgactggggagctttgtcatttgatgtaaaagtgtgtaagacgaattgtctgagtagaacagcgatgagagctcccggggaagttcaaggttcttacatagcggaatccattatcgagaatgtagcttcttctcttcaaatggatgttgatgcagtgagaaaaataaaccttcatacttatgatagccttagaaaattctacaatcacattgctggtgatcctgatgaatatacactgcctttattatgggagaaacttgagatatcttcaaagttcaaggaaagatctgagatggtgaaggagtttaatctttgtaatgtatggcgaaagagagggatttctcgagtacctatagtccatcaagttatgcagagaccgaccccggggaaagtaagcatactgagtgatggttctgttgtagttgaggttggaggaattgagatagggcaaggattgtggactaaagtacaacagatggttgcttatggtctcggtatggttaaatgcgaaggaaacgaaaagctcttggatagaatacgtgtagttcagtccgatacactaggtatgatccaaggaggtttcactgctggtagcacgacatccgagagcagttgtgaagccgttaggctttgctgtgttatcttggtggagagattgaaacctataatggatcagatgatgatggagaagtcaggttccgtgacatggaacatactcattcaacaagtaggtagcctagtaaattctgatagttactcttctataacaaagattctgcatgaataaccgtaacgtttgcatttttctttgatcaggcgtatggtcagtatattaatttatcggcgagtacattgtataagccagagtattcttccatggaatatctcaactatggagttggagtcagcgaggcaagtcactatgggaaacacttctttctttatatttgaatcaatcaaacaataatgtgattctacttgcaggtggaagtggaccttgtgacaggaaaaaccgagattttaagatccgatattatttatgactgtggaaagagtcttaatcctgcagttgatttaggacaggttagctagcatttagttaactccacaagtttttcttgttttcttttagtcattttgttgagctaagcaaaaaaacatggtttgtttttgaaaagaccgaaggagcatttgttcaaggcatcgggtttttcatgatggaagagtacactactgatgagaaggggcttgtggtgcaacaaggcacttgggactacaaaataccgactgtggacacaatcccaaaacacttcaacgttgagattgtcaacactggtcatcataaaaaccgcgttctctcctccaaaggtactacacaacgcttttccttatcccatagactttgtataatagagacaattttagactcttacataaacactctgaggttttttggttagaattttggactgaataatataatagagacagatagttgcaacaacttatatgtatcagtgttattttcattgttactttcatactcaacaactttttcatttgatcaacagcgtcgggtgagccgccattgcttttagcagcttctgttcattgtgcaacaagatcagccattagggaagctcggaaacattccctttcatcgaacttcattgatgggtctgattcggaatttgagttacctgttccagcgactatgcctgtggtgaagtctctttgcggattgtatagtgtagagaaatacttacaaggaaagatcaaaggacaataaaggcaaagcaagtaagcaactctcgttgctgctaagttacagtgttacatatactaaagttattcagattttatatacagcaaaaataattgctttgtgcataactaatggtttcaaaaccaaatcaataaatcaaatattgaatgttaatgattagagtgtcaccaatatataccctctttatatgacctcacgttatcgttgtgtcagttcagtttggtatgctagaaatatcaaagcaaactaaactctatctttgcaaagaaaacaactaaacatctttacaaaattaaatgcggctgattaggttttattcttcgcatccatttagaactatagagttaaatctaactcgctgccgtctgctagaactttatagtctatactagcctaaatgtgatttggttctagaaaatggaatttgaaacttgatctaaccctttcttctgttactcttctttttatttgcacgtgtggcattctcagacccagaggaagaggtattggtagatgtagccaagacagtaccaaccttgacctccgagatttctttctcaccttgggtcattagttttccaagctgagagtgtgtaaataacagagttagtaggtgttttactatataaaccattacacgggactaccctgaaacataaggactaccgtgtccaattttctgttaacgagagcatcagccattctactgtcagaatattcacagcttccacaatcatccttgctcggactacggtcaacatatttgtcgccagcataatcccaaacacgctttgtttcaagctcaagtaaatagcgatgccctttctcctcccaatgccttctggcacgtccttccttgtacctacgataattacaaagcaaaactggttaacctttaacagacgagacggaaacatgtctccatgctgattacaagagagtgcaatccatacctccagcaggcaaaaaccccgcccagagatttcccgctgcttggctatatcggcaatcctgagaacaaaaacaacaccccatagatacatgaaaaaaactgcacaagatcaaaacaacaagaaaatgctaaaagaagcttactggacaagaagaatctggccaattggaaagacatgaaccattgaagcattgattgcgcatggttgtaagaatgccaccagtgtcttggtctaatcattctgaaacaggagcatatagaaacacaaggtttagaatatatcgtagccaaatacatgacactagagatactgtcagttatagtactaatacctataccgtaggaagattccttatcctgatagaaatcattttgttttgtttatttacatgttatagccattaaccagaactcaatatcaggattactatcataagttaaaagttaacaccactggaatctggatatcataaattttcatggaatttttttagaatagtagaaaagaagatatgacttattccactgttaaacaacaaaaatgtatcattacataaaaacttgggaagtggcattgcataaaagcaaaacaaagaaaaactgacttatgttctgctttatagtctaatgaacttgctgcatcataaattcataacacatgcaactataatgctgttgctggtgtctctcctctgctcaaggcattgctttagccttgaggttcaaacaaagatgaaattaaaagtgtgagcactaaatgtaaacgacatcatcgatacgcaagctttggttctatgggaagacgaatctcttatcataatttatgttgggtcgttatgtgtttggtttaatgcttgatgactgcaaattggttgttgctaaagtaaaaatggtgtttctcttctgaaagataaaaaaagcctcaggtttctcctctttttggttttgttgatgatatatatttagaaccacaaccaaaaagtttcttgcttcgatttgaaaaggtttacttcacaggtatggtacaaaaacaatattacaagtacaataaaaaaaaaatcaattcctgtttgaaaacttggattaattttgtttatttatgttccctattttggttataaaaagtaagaaaccaattagtttccataaatgcataaaagtctcgaaatgtaccatagattaatatagctgagttgagacaataaaaccgttatttcaaagtatacttagataaattatacaacctgaactgcacattagactaatatatattcctagaatcaaaccctgaaaaagttttaagcaagctctcgaaagagagtactgagaagagtttacccaaaccacttgactgatcaggtatcgtgggactgatctttctcaatgaagtccaacgcctgatcctttgagataacattcacaatactcactctgttcttatgaaatactccatatatcttatccgcgactctcacaagctcgggacggaaagttgtggtgatgaactgcgtgccataatcatcagcaagacgacgaatcaagtttcccacagcggttcggtactgtggatcaagtgctgcatcaatctcatcaaaaagatagaatggtgcaggatcacatcgctggattgcaaagattaacgcgagtgcaacaacagtcttttggcctccagacaattgtttcattaattgtgtttccccttgaccagtgaacgagacctacaaaacaagtaccaactattatcagcctgaaagctagacaaaggataatgatatacatggtttctttatatgtagtgtccacaagtcttttcttcctaccttcacttttacaccaatgtatttctcaacccttccctctgtaacagcttcacgacctccatcatcatcatcatcatcttcatcatcattatcaagatcctgaatatgtgaaaccaaaatgttttatgtccacccaactgattagtaaagagatcacacaagttttacacagaggcaagaatcatccagaaagacaacagtgcagatattggtggtcttaagtaatccttggtggagtcaaaggaaaggtttatgcgaaagtcaaagagaaaacgaaacgcatcagacaacagtgaaataccaagtaagatgaccaacaaatagttataccaaggatatacttctacactcaaggctcactagaaaacatctactcgtggtttattagaacacaattgatctcattcaatagtactctcaaatttagttaaccatttgataatgaaaaaactcacgatgacttaaagtaaacaaatgttaaaagaggaaaaagtttcattgaggaaaaggatgcagaaacatgcctttttcttcataatgataaggttaccatatccatcttgcacaagctcagagaatacatccctgaagtgatgtgcaacccctttgaaagtacgttctatagattcgtctttccgctgatccagaactgttatcagctctttaattttctgcggaaacgatcatgagtcagtcaagctctactttctacatagaatttggcaaagtgtatgaaacctcctattatttacctcatctcctgcatcaagctctgcttgccgattttgaagttcttctcgctgttctgtgaaattcacatattgatccagcgctttcttgttgacatggctgaattgttgcagctgttcactgcaccggtgtagcatcttctgcagctccttgatattttttcgtttatacctataatgttcaatagcttgtatatattatagaactcctaggataaaactctcatgatacaacaattgtccaccaatgatgactaagaactaactggacaagataaatgaaaattgggacagtataactataaaagttctaactagactgagtgctgaactttctggatgcataaccaataagaaagagaagaagcaaacatacgtgtcaaaagcgtcagatgacaatggacccaatcccctaatcttcttagtatactcatcttgcttagcaaggagcgtgttgcgaaggctaaacagttcctccaactttttatctaaatcttgtagtgtccctttacaatcatcttccaatgtctgagagaacaagaaacttttgttagatagagaaaaacgcaggtctcttactttatgatatattatactacctttaactttgctttctcatctttaattttcttgatttgctttgtcttctcatcaatgctgtcacagacacctaaaacacacaaaatggcattgagtgtactcgtctggatagtaaatagtaaaagaccaagatcaagcaatgccaagcaaagtagttcagaatgtttgggacccacttttgagctcttttgcagcctcattgaccgacaattttgcatcatcaagttcctgttcttttgtgccagctgaactaggcaaactatcatcgtcgatggaagctatagtagcctgtaactcagttattctcctctttaagttggtagcaatattagcctccaactctgcttttcttgtctccctctgaggttaatgaaaagcacaaatcagactttaaaaacaaaagaaagcacatgaatcagacataatcaaaaaaaataaaagcacataaatgagacttcttcaatcgaaagaaatgcaaacaaatcagaaattaattcaaacatataaacttttctttttcattactgcgaacctcaatgcgatcggcctggtatgcaaattttttttccttaagatccttgatttctgggtttaatttcgacaattgctccctttcttctggagttaggtgatccacaagttccgttcccatttcagcttctttcatagacatgctggatctaacctggtcaattcgtgttctaatatcacctagtaatttctcctgcaaacagatgaaacaatttagtatttacaacatgggggaacgatataattaacactaaaggccactccaaaaaaattgaattgtaagaaaaaaggcaccttatattcaatggctttatgtatagcatgtttctgcttattagcgttagctatctcttgcttaagttgctccacctgtaatttgcagagcgtccagtctgcttcaagtctctgctgctcagtaacaagctgtgtaatctgctgatctatcagtgagacatgttaaggaaacgctacaatcaacacacatcaatgaacaatacgatgtagtttatcagaaaaccaaaatgcaataacaagtaaacaaaagtcagttatggaaaggatatcttgcagctgccttctaacatcctccagttccttctccttctcatttatagactttgtattttgcattattatattcatgaatctcaattttgaccgcctgtggtcatagaatccaccggtcataccaccctttctgctcacctggtcacctgtcatagtacaacagagccttcacgtaccaaatacatgttgaaatggaatttaaagtgaatacaaatgcaataacagttccaaccttccatagttatacaatcgaggtcatcattcttagcaactcttgttgccacattcagatcacggcatactactgttctaccaaaaacctacatcaagacacattacaatataaagtgtcatacatgagaatagaaagacacataaaaagctcagaaagtgacaataaattgatgggcataaaagtggtggacagggaacaaaaggaacacctgacccaatgctggttcaaactttgaatcgaactttaactttttgagcagaggtattgcatcagaatcttttggatagttgacgcgaggcgcctttatccgattcagaggtaggaaggtcacacgtccacccttgagagaattcaggtgtctaattatcttggttgaaatatcatcattctcaactaccacgttaaacaggctggtcgtagaacaagagatgacaagagtagatcataagataaaaagtagattcacagtaattgtaggtgtgaggtaaactcagtaggtttcctgcatacctgtttccagcagtgacttcaactgcagtgaaaaacttttcatcgcaatcaaccaactcaacaagtggaccaaaaactccattgattctatagtctgcacaaatccgtcgaatagagttcagccctctccttacatcctgagacaatgaatgggttgagtcaccagaaacgaaaaactgaaaatggacgtcaagttacatcaatccagtagagatataaaaccagcacattgcttgtcaacttataactacgctaaaaggacttggatgtatcttaggcatcaacttctcttaataaattaacattcttcctccatattaatggcttcaacaagaaaagggataccaaggccaatcacttactcctggagttgcatgatcaaggtttttctttgcccgttcaagttctgttttcaacttgtcaatctcagaagaaagttgactttcttctccccatttttccctgaggtaacatttatcctgttacatcaaaaaaattgtctactatacttaacaatttttgaaatgacagcaattcttactttctttttctttgttcttcatctctctccctctttttagtattgaatagttcatgggacttggaaatacgagattccagttcaccaatttcaacttcatgtttcttgatgtgctcatcacgctctgtcaagtcagtattgaggcgaagaatttcatcctgaagtttttgctcctatagtagaatgaatgtattagctcaccaatcacatgaaactgattccatatatttactgacaaaagatgaaactatagagagatctaaatatcaaggaaatacattttacaccctcaacttttaaacattgtgcgatcatgtgatctaattatgctacgatgcatcttccatatttatgcaaactcacttgaacagtatttgagtctagaacacgcttaagatcttcaatctctttcctgagccatttatctcgggcagccttatttgaaaattgagttgcacgtccctgtttctgataaagaatgctaagtgttttttccagctcattgattctgtaagaagaaaccataaacaagattatcaacgtaagatgactctaacagaaaaccagaaacaaaattccaatatgcatcactccaaacagtagaacttcacattttaattcaacatttaagcttttacccaaaatcatcgttgtagtctttctaggatattaatactattacttccctcaaacaggaggcctatagcaacatacaacccattcattgtaaacatgaacaaagctatttccgtgttacaatgacattatatatatgcttacctttttgatgtctggttttccttgtcaacttgactttcatacaaaggcttaatcgcctccagttccctcaaagaatcctgcatttctctttccactgtattaagttgctcaagtgcatcattctgaaaaaaaacatatgacttcataagtgcacattatccaaatatacatggaatatcaattagacattcattagcggatatgcgacgtttaaattcgtcctgatgtatacttcaaagtttttaagcaaatgtgagtaagtatcagcttgtgaccacatgtgtcgccaccaagttggtagtaccttagactgaatatttccagtaattcgatcctgaaagtctttcacatcaagctccagctttgtctttttctttaacgctttagtttgttgagcttcaacagtttctttctccttgtataacgtctgaagctcctttgtcagttctttcagggattcatctaaagacttggagtcgtcctgggccttctccactctatcatacatttttgtggactcttcagatgccttagttcgtgcaacttctacctatatcgtgaacaagaaagctcatttgtaataaaggtaaagctcagcaatgagtgaataatagaataacatttactcagagaagtgcataaaacacagagtttggcagagcccaataaaacattaatataactagcaccagtaacagaaagaccaacaatattaaaaatttatttcatatttcataagaaacctcaatttcactgaacaaacaagagaaaaaaaaagattaaaaacatgtgtgcctaatttaattggctgacctgttccagtttctcccgagcatcgtgaagctctttgtcgtaaatggtgtattccagtgattttctctgtttgtcaagttgttgatattttctgagttcttctttctcttcgtccaattctcttagtctttcatccaagtagtggacaacttcgatgatctgcttccgtttatttcctgaaaggcaagtcatttggccgtattagatttttaaggtagccatgcatgcatctgaaaattaaagaggttttactatcactgcacactgataacttgcctgtttcctgcataattcttaaactctcacgacgcctctcctcataaacacgagtaccacctatctcttttagcagatccaaccgttctatgtctttcattagtgttaacgaggctatctacaaacaaaccacacataaaagggatttaaaatgtagaattccgttatatagaaatctgttagcccatagtagcttttttctgtgcttggaaatacaggattaatccaactatattttctctagcaggagcttacctttccttgttgaacaacatagtaaggattagcacgagaaaatccagcactctccaataaattcataacttcaccttttctgcaagatttgtcagattaatgttcacccatctacgaaatagggcaatggcaaagagtgttcaaaattaaagatacagtaactcacgtaatgtgtttcccatccaagaaataatcatccttcttcaggccaactgttctgcgcaagcgtatttcttccttatcaacctagtggagaagcataaacccaaatcatgagaacaactgatatataccatatttggaactacattgcatttaggactaaacaggtttttaacagccttagtcttttaatttcaatttgtatagcacccaagtatgttttgataatatcatatttacataggtgtggctaatctttacaaatttctgtcttacgaaaaacacaccctacatagctaagaaaatgatgatggttttatgaacctgaagggaactttaggatataactgattgacatgaagccatgaaattaacttatatcaacctatacactagactaaaacatgacagaactaatatttccaagcttagtaacaaagttttcagcatctagctgacagaactactggtcgaatgcagtagtatctaacatgaacatctatttcaccaaacaaaagaaaacatcccatcctgattttcagacagaacaagtttaggaaatagaatacttaccgggaaccggttgtcagaattatcaaacacaatctccacgaacgcggacacgacttgatgaccagcaccttcctgtccaataataacaaagctcagagttagaaaatattcaggatagcatgaaaagcactcaacgaaacaacactaaagcctgtagcaaacttgtagacatacatggagtaatgcatgcctatcttcactgcgcagattttggtagatgtcactcaatacaaaacgaatcgctgcatccaaaatcaaagaattcacttagaatcaaatatcgaaaacgtctgaaaaaaaaagagaaatgacagacgataatcacgaaggctaaaatctcaccatggaagaaattgcttttcccagacccatttgccccaactacatcaaagaacaaaccagatcatcagtttcagtaacaagtttacactagaacgactaacaatccagaaactactcagaacaagtgaatcaaagagagacattaccaacacaattaactttgttgctaaactcctcagtagcaacttgctctttgtaactcttaaatccttcgattataaccttcacaaaatcaaatccgaaaacaacagaggaaattcaatagagatcatttaccagataaacatcagttccaattaacaatagagtaagaacagttcgcgaattc

SEQ ID NO: 291 - DNA, 30219 bp, Arabidopsis thaliana
ccacgaatgtaaataaatagcaatgtcgcattatacttaattgatctaaaaaggaaaaatactattatcataaagtgaaagatataaatacaacttggatctgaccgacacgatgaattctcatacacagtctcaatccaccaaactaaatagttattatcacattcaataatagaaaaaaaattgatctcaacacatatcgcgatatcaattaagatacgtctagctttatttcggtgtgtgatgggaagctttccgaggaatacaggcagataatggcatcaccaaaaaataatgtctaaatgtaatctattaataaaatccaaattttatattagtattcgaaattattttctagatacattactatgtcaaaatgtgttttaactatggatggatgcttaattcgaagagtaatgaatttccgggaattgtggaccatgtggtctattttccaatgtaccattactatcttcaaacacaagtactgacaacacaaagaaaacataagagaaaatatgatttagaaaactatatgaaaggaatagggaaattttgaagataaaggcggaaccaggcaaataaactttatttattttggctgataaatttttaaacatagatttgcattgcaatacagttaattagttgtttagttgtggaaaagaagaaaaagagtgacttgtcgcaaactaatatggttatctaaatacataaaagaagacttttgatgtgtggagtggaagtagacgtttcctcgttcttcaactatctccatggttctgctgacccacttctattatcttttcacatacatttaactatacacatatacatagattcattgtagattttaatttagtaataataatacaatatactaataataaatgttgacctactaagttattcatgtagggatcatatagatgcgttgccaaatattaaacgtgcggacatcaaatgataagacaatactaccatctgtaatatatttttctcgtcaacaaccattaattaaaatcttatttcacctatagtatacaaatggtaaaacgaatgacaatgatagaagtgtgatcgtaaaaatatatatatggtagctatacttattcttagatagattgtctcgtagatctacatttgcgaccacattgaaattttttagctaggttggatattgggtgtgaatcgtgcctaagatgcaagtgagaaatattggatatgtagcagtagcatgccgtgcatatatcatgtatgctagaattggtgattggtcaaaatccattgaacttcgaaacatcacaagaaaaatattaatcgtgagtgtcactgtttagttgtccaatgagatataaaagaaaaaagtacatatttttcccatttatgaaaagtccaatcacattttatttataaaggcgacttattggactttctagttgacagatcaatgaagcagaggatatttagatgatcatcgcaagcagagagaaagacacgtcgaagaagacaatgagaaactcacacccataatttgctgctcatcatttctaattattaaataaaaacggtaatttaattttcttgatttgtcacatctttatttcatcatcttttgcttaccttttcttcctaagctcttggatattattaatgttttagatcgatttatattataatttgatattttcttgaattgcaagttttgttgcttaattgtcagaataatggctgctttctttcttggagaatctgaaatgagagaacactcttctgatctttttatgatgactctgaatccgtttcgcgagcagacaacgaccactaatgctcatgacgatcacttctacaacttgtgctttggttcccaacaatatagacctcgagatgaagtaggtcatatagaacaaggaaattcttccatctccactttttcaaacggaggagtcttcagggctttggctccgatctacttgaaagcggctcaagaattactcaatgagattgtcaatgttggaaacggtagccacggcgcaaaacaagagcgaccggtgagtaaagagtccacgatttatggagttgaggacatcaatggtggctataagcctggcgtagctgctttgcaaatgaagaaagcaaaactcatctccatgggtgaaatggtaacttatttatacctacctatataatatgtgatacacaaataataataataagatctttgtatatacaaaccaaccatggtgatatatataatggcaataaactttctgttactttgagatcgggactcaagttcagtccatatatttggttattgcatgttaagtatttgatactttataaaggtttcaaagattggtaaattgatttgggaaatgaatttggtaaattatacacaggtggaacagagatacaagcaataccatgaccaaatgcagactataatctcatcgtttgagcaagctgcgggtttaggctcagcaaactcatacacacatatggcgttacaaacaatatcaaagcagtttcgtgctgtaaaagacatgataagtttgcaaatcaagcaaataaacaagctcttgggacaaaaggaatttgacgagcagcttaagaagttgggaaagatggcacatcaccattcaaatgcttggagaccgcagagaggtttgcccgaaaaagttgtttccgttctacgctcttggctctttgagcattttcttcatccgtaagtaacgttttcttctatctttaattcttgttacgattattgtcgatatatcagaatgatgggaccttgaagcaaagggaactaactaaggatatggaagctaggatcattacttagttttgtatagacatgcatgctaatgatttagttgtgtcttgttttggtttgtatagatatccgagggatttggataaggtaatgcttgccaaacagactggccttactaagagtcaggtaattgatttcgattatcagaagttggacatacttaagtttcttaatgttagatgtctcatacatagtacatatacaatttcatgacatcatctaacaccgactatcaagaataaataatctacaggtaaaaccgaatatatatatagattcaaacaaattttattccgatcaaaaaaatatttttagaaagatatctctttatttctatttttttttcttttcgagtctgaaaacaaaaacgtacccaagaattctaagaaaagcaggtaaaccaaatatattttggtaaatttatttagatagatgatgtatatttattttattataattattttaatgaaaatagcgatgatagcatacgagaaatatcatatatgtgatcctttgtaaagtaaatcaaatttattttggttaaattagtaattatatatattatggaatactttcttttagcacccatgattatatataatcaaaataagtattgttaatagtatcttgtgtaaaatggatgtaggtgtcaaattggttcattaatgctcgagttcgaatgtggaagccactggtggaggaactttattcggaagaaatggatattgaagaaagcagaaaaggaagtgaccggtatagtaccaaaggttcatcttcaaagcaaccgtacaataatacaacttcaaatgaatcttcgaacacgatcctacccgcctttcgtcaaggattcactgaaactgaaacccctaggcaaaattcatcctcaagttgcagcgtagtcatgaggttcacgaagcaacacatgaatcaagcgaacttcatcaatttcaacggagggttcgaaaactatcacacaatggatggaaacagcgtctccctttccctcggcctgcctcattcttgtgaccaaacctttaataacattcattttgagtcaacaagtcatggaactgagaactcggccatatattcatcttcaacttatcaaatcatggattagaaataattagtggggatgatatattttctgcttgttgcttacgtatattctgtgtatagttttggcccttggatggtttcgtatgggttgatgtgtgtagattgatagagaggagatgattaagtaaaggttatgataaaaatgtagataacaatactaagctaaagaaatatatatggttttcgatagtcaggttttagttagtattgttacgtatgagtgtaaatgaagatcagatcaaccgtgagatccatattagctaatagttgtgactttatgaacgtgtatgtgtgtgtgtgtgtgtgtatgtccccaaaaaccctaacttaatctcccacctcttctgtcttttttctaaaatttgttccacaaaacaatgaatatatattagctataattattattttgttgttttacatgatcatcttagtgacctaaccacaagttaattggctaccaagaagttatggatttatttatttgagttgattttttgtttgtcttccatatccaattttttattttttattttacaaactaacaaaatacagaaatgttttaaaaatgatggtaaaataagaatatgatagaaaaaatgggagagaatattttctgtatcattaaacacacaaaccgttgctacaaattacatactgaaaaatatgaatgaagacattatacaaacgaccaaacacacctctctatgatacataaataccccaaaactaaaacaacctctaaaatcctcctcctactcactctcctgtttgtgtccctcaccaaaagtccaataccacatatataatcaatactaagaaaaaaagcaaagtgaagaaaatcaaatatatgaataaaaatgagaaaaccccttttacaaaacaaatactcttcctcctcactactactacaaattctttaccctttcatcatctgacttgaatgaacttaacctgtgaaattcttcgataactcaaaaccctcattgatccatctcgttggtaaatagcaatcgataattgaatggtttggttggttctgtacacaacatgaggatcacctagaggcggctgtcaggactcgggagaggtatgttatctcgcactcgtcactctttctgtagggtttatatccaagcaagagagccgcggtcatttggattttgtgggcgtcctcttgttggtgttggtggtctatttacgtttaactcctgcaaaatatcaatgcttagttacgccattttccaggtggaaaaaggaaggcattagtatctgtttgagataaaaacctgcatccatgtatcctctatatgtctttctggtgaagtttcaggtgaggttatcgctggaggcaatggatggataagcttaggaaccaccacaagatctctccccaacaccaagatagccccggcattgtttgcggtacctgagaaggaataaatatagatcattttttgtcagaaactatcagatcaggtcttattaccagcttaggagtgagttctcggttccataaacataccacaataatttgttgccgaaaagagcgttatcaaatgaccttgggcaaaacgctcaaatccgtccatcacgcattcatgcgcacgtacaatcaattgcagatcattgttgttgcaaaactccatgacacggtcaggctgcagttgtcaaattcttggtaagtaatagaacaggcagaactacttatggaagcgaagtagaattatattactcaatataattgtctaacaacagcccatgaatatgtcaagggtaagggactagcaaaatcagtactcttcacacttaggaagctcaaaatgagcggaaagaaaagatcactcaagctgatgtaatggagtatgaggtgaggaggggaagggaaagagagcagtaatcaatgcaaagtgtacgaaatagaagaaaaagaccactcaccccaaaagtaaccaacccagggcctctagcattgggccttaaaccttcgacactgtcattttcagttggatccgacctaacagattacaagatgacatactagtgagacaaggatcacggaaacaacatagaatgatacagcattagacatgaacttaccataataaatccataagtacaattgagcctgcttccatcgtaattggacgttggatattttctatctgctccacatgatttatcgaccgaccaattcccccatgcatacagatgattttcttctcaatcagtgcagccagaggtagccaattgaataaacggtttattcgatgccacacccagatcccatcacgttcaccctgcaaagtagccatgacatgagaccctaaaagtggagcaagagattcacagagatgagacactaccattcgctcaatacactctatccggaaaccaaaaagtgcattaatgtcggcagcttcatgatttccacgaatcaggtgtacgttatgttggtattcaacctgcagtgtcaattatagagcgttatagcatttcttattaagcgttaataatacctgaaaagagagcattaatatagttctctttaaactacctttaaagcaagcagaagtgtaattgtctctaggctgtgttgaccccgatcaacatagtctcctaagaagaggtaatcgatgtatctgagaacaattaatacagtcagtaatgtcagaccaacacatagcatggcgcaagagatttagctgcacacttacgatatgtctccagctgttgatggtgaaccatattcatcaaaaaggcgcatgagatccccaaactggccatgcaaatcaccaaatatcttaataggagctttaagctgtaacacagtaggttcgcttgagaagatacgttctgcactgtcgcaaagatcagctatttcattgcaatccaagaaaaactggcgacgaactggaggcttccacccccgaggcttcaaaagatgagctacaacctaataaaattgagttgtgaatcattagaaggtattaatagtcaactcggaacctcataccattgaacaatacaaatgatctagtcggattacatgtctgtttaaaaataagtttccaaaactattaaaccaaggggtaatacacctccacagtatctaagtacacttcctatctttatcagacaaaccaaatgaccagtgccacagcagacaaattctctacaatagttcgagcacacaataacaatttcttgcaacacttaactgattaacaatttacctttttcggaacactattgattgacatctgacgatctaataatttcctagctgctgttgcactttcgggtgtcccataactaacacggcgtccctcattttcaaattgatcaatggataactgtctaaccattccacctaaggctccacctgtttctgcagcaaccaccaccttacaaagttccaaaaataaatgcaaaacaaaaatcagaaattagagatgtaaaccactggtaaatgagctggaattacggtaaatgacagatttttcttgatagagttagattgactcacagctctatgatgaagtcgaacccctgcaggaataacactatttggtactgcagaatcaggcttaatcaatgataatgaaggttttccactgggcgtagcctcagcaccacgatccctatctggaagttcaacttccccattgacctgtcgtgccttcgcagcagctaatgttgcactgatagcctcggcttccgcagcagatgcttcaacaagatactccacacccttgcttgttctcctacaatgttgtttgataaatattttacaactaaatgcataggtgtgctaacaatacgacaccccacatattaagacactaaccgaattcctggaaccattgcattttcagtgctaatatcagtatacatatcaccatttacagggggtgcaacagggcttcccagcaccacagcgtcaggagctgattctggtagctcccctgtcctttcatcagaaaatccatatcttccaggtgaacggccaggtggcgtgtttgttgctgctgctgcagcagcagcatgagaggcagcagatgttgtttccgctgcagcaagatcttcagcaaccaataggtcatcaagtaaaactcctataggatcaagagaatataattaagtttagcagctacaatttttaagaaaatgcacggtctgcaaagggaagagaaaagaagctacggcacatatatttggtgaagaatgatctctataatggttttactaactaatactgataatattaagtcccagactttaacaaaagatcaaactacctacttaaaaaacaaatcctacactatcatacactaacaactcaataaataatatgccaaattagtagatcactggattctcagtactatatgcctggttcatttcatggacaaacgtgtaatggtaaattgcctataacagctatcaagcttttttccttacctccacgcaacccaccatagatgaatatcaaatcacccactgcagcagcagcatgcctgcatcgcctagtcagctcaacagaagcatcaccaccagctgcgtcagcactatacctaccagttctaggactagtaacaaccgattttgtatcacaccaaacacctgctgcagtatccaacactgaacaaagagaaaataatgaaccagtcagagaagcttacatgaatgcatgtactagttattacgaaaataattttgtagcttcctcatgagttatggatgagtgaacttttttttaatatccctgtttgatagttttatataaattgcaaataaattttggcttctacagtccattgagaagaatgatgcagcttaaaggatgaatataactatgcttttagaaagaaataatatgcctcactaacaattaatcaattaagacagccaaaagttgtaccaaaaaaaagtaacatatccatcattttagagattgtatgtataagcaaaaaacgtaagtattatctcattaacaacacaaacatgagattgtttctcgcctttcgctaacctgcaacactggacgagtcttctaccatgcgtccaccaccaagtgccccaccagagacatggagtcttgcatttacaaagacctaaaataatccaccaaatgttggtttttctgatggaactagctaaaagaagtaaaaaaagaagaagaatctcatactgcagcatgctggtatctggcagaaggggagacacctggggctatggcccattcccaacgtccatctctgtgcttggcaagtccatatgcacttgctaggggctatcacgcagaggtacacaaagacatattaaccatggcaatcgaacattaaatatcaagacagataaagaagctcttaaactctaattgtcactttaagaacatgatagatattttcctatttgaactcgtatttgaagtaatttgcaaagaaaagctattcccctctcttcatgaaacaagtttgttcagtgcagtgttaatttaatggtaacaaagagtaatacagcatttggatttcctccacgtcataacatggcagtaaaaactctttggcttaccacactattcgcatctcttccaccacagagaagaagaaggccatcagatcgcgcacttgcagttgcatacctagttataatatacaaacccaagagatccaaatcacttaactgaaagccacagaatcacatacaagaaatgaagcgaaggaatcacaaattacatgcatggtggtggaccttccccttccggttccagcttacgccattcataaggtttggcagcagtgtccaaagcccatacatcagctaatggacgtttccctggtaatataaggatattgagaaaaaagaagctatttaaggagaatataaatacatatttaatgaggtggcgagtgaaactgcttaccatcatttccaccaattgccatgagatacctctgtcctaccagtgccatgacatgtccataacgtggtcctggtccaggaccctgaacaacaaccctagataaagaggataatccaaatcaagcgacaagctagcatatgaacttcaggaccgagctagcgacaaagagcagattaatattcaaacctgtgccatcgtggccgttgctgtgtgagatcaagaacgtgaagatcctcagctgataaaccagcaggacctattcccccctgcaccacagaaacaaatcagtagcaggttcatttacaaccctaaatgataaccttgaattgctaaactataatccataacaagaaaatacaaaacaatttctcccctacctgaattactaccatggtcccaacagcagtagcaacatgagcagctcttggactaggtggttctccataaggtgtaagcctataccatcatttcatcatattaattcaacttcacacttaacaacaaatcactagatctcctaccttaaacagcacaattcatatcttctactcacctcgaccacttattagaaagaacatcataacaatgaacatcagcggttgcaccagctaaccctgcataggaaacattactcttatcacatcagggcaagtctaaaactgatgcaaaatcatactctaacatcaaggaatgatttcagaaactaaagcttatagctttatacgaaactaaagcaacgagaaatcgaaaaacatacgaatgccagcacttccagctgaagtaggtgttcccgttcctccagaattaccctcaagagcagtagcaccaccaaacaagatcagtctcgggccaatataagaagacgtcccttcttcaccaacagcaggaaccgccgtcagcgtatgtccacatctaggaccaggaccatcttctttcttctcgattatagcattcacaaccgaatacgttggcgcacatctcggaccaaccaccgccgttacctgcggctgttgctgctgttgttgttgttgctgcgaaggaggaggaagagaaggagtcaaagacgccgattcggattcggatccggtttgttgctcagacgcttcttctttctcctccataggagattgattctcagacgtagcaataggatcttgatcattctctggtaccattgaagaatccaaatccatatttttcacaaccctaaattcgtcaatttcaatgcttttttaattaagaaagatcgtaacacatcttcttaattagcaaattccaaattctcgcttctagaatcttcacggtggagaaaccctagctagcttttctccggtgagatcttcccggaaaaaagttaattggagtagagagattcggagaatttgaaaatgagtttgttctttcttcttcccagtttttttttttttgttgaggaataaggacagagagacactcaacaccaaacaatcaaaaaacttgccctttgtttatttatctctctctctttaagctaagataattacatttattaaatcatttttatcatttacttaattactataaaaacaacagaaattatttgaggaaataaaacaattatctatttcgatttgagtaacgaaattgaagctatatatagtcttgtactaagaaattgtttcatcatttatgtaatgcaaacaatacgcatgaaactgaactgatttggtaatgtgtagttagcttaaaatattgtgttgattattttatatacctaatggtggatttgtgagagacatatgttgcaaattgtagtgttttctaggaaaatttagggtgatttataaagggtgatttatactatgataattgatacgctttttagaaaactatttgtatttgacacactttctcagagtttgtaccctttcaaaatttttttttttttttttgacatcgtaccctttcaaatgtttgtatcgtatttttataaatgttttaatttattaggcagtaacatatagaaatgtatcttacagtacagaatctagtaatgtacctacgaatttaaggtcaccaataagtgctataagacttttacattggttttgatcatccaaattgagagttgagactagataaaaccacgtagagaagaaaagttcggtcacatgtcctcggttcttaaatggcagtaactacatttactagaaagtaagaattcagtcaattttaagttcattgatgaatataacacatgaaactccatcatcaaaatattgctaataatatccatgttacaatacataaaagtggaataaacaatattgctcatgaataaatatacaatgaatggtgaagaaaaatcgtaatgaaatgaggatttctaatgcattgaatgtcatctacaacagaaacgacattagtcaattcagattaacttcgtacaaaccgccaatttcagttttggaagctttagaaataatctatgaagaaaaatgactaatataatggaaataatgaaactcattcatcattgcgtacaatctggatgttacacttttttatatatgaatttaaatttcagagggtttgtaattaactacaaaaagagcttaatcagtaaagtttccctttgccaaatttttttaaaacaatgaagaacctaggaaaattctgagttagaagagttgagctactcaaatttgagccaattgcaaataaattgttgacttctttactgatatgtttgtttgctcattaaaagacggcgatgacatactttagatgaagtgacaaagcttgaggaatctattgaatttgtccaaagtccaaagctatgaaatagagcaaaaaatgaaaatatcaacaatggtgagaaaaccttgcatgtgcattgatttagtacaagagtgatgctggagaatataaaggttacaaaatgtttattcttttttttttttgtctaaaacaaaagtctgattcctaaattgaaaaaatacaataaaagtctgggaaatgaaaattgtagtttgagttgctttgcatatgaatgagtgatcttttttttttttttttttgttatttatggtataaagccaatgtaacaggccaagattttacacatatttaaaaacaaacaaacccacaaatagaaaacaaacaaacccacaatgagtgagtgatctataatatctcaatggcaatatattacaactaccaaacctgcttcgaaggactcttcatcaatatattgactagcatcaagttgaaactttatcgatatcactagtatttgctcaaacataatatctaaacaacagctgttagaatgttatcacgatttctacaataagaaaaatccacaactgtatcatatattcgagcatttgttgatcggtttcaggaaaactctcagaattggcgttccatcaagaccgaatcattgtttcctatgtgacttcttgtgctgtttcgttttggaagacacaagtccatttgcaagatcaaacgagctaagatcatctagaacttgatcaagaccaagactaggagcttcttcacctttcttctcagtctgtgaaccttctcttgtttcggctcccaaagtgtcatccgctgtctcgttttcatcatctcgggttatctctggaggcattgcaaaatgtggaagcttaccttcaatgtaatctttcagaatctgcctagctgctctagtctcatcaggtagtccactagaggcaacataaccacgagagaggcagtaagttcttagaagctctgaggcaagaggtgggcgggactgaggttcataggatttgggtttaggtagagagatgttgtacacatcctcaatggcatgtcgaggaacaagttcagccacaaccttaatagcttcaaggtgctcggtcatccggtctattggaagaactccagaagcaaccatttcatatcttgagcttgagaatgaagggaagactaaaccagggcaatcgcagagcattagatcctcagagattatcaatgtctggaaatgctttgttttcccgggggtagatgtgacaccagttcgcttctgacctaccaatgcgttgattgtcgaactcttccccacattcgggtacccaacaaagccaaccacaacttgttcgcagtgtgattcagtagaagttgcggaaactcctctagatttcctcatttttactatctctagagcctcaagttttaatcgatccaaaaggtcgtcccttccatatactttcacagctgggttatctgtcttctgtgtggtatcaggtgctctccactgttctttcaggggtttaccttctagggtagccgtagcagctttggctgaccagaagacaaacagaatattgttgcgggagaagtattccgcccatttctccctgaatttacattacatagaaccgaactggttagcaataaaacaaacaggttggaggaaaagaagcaaggcaacatgtttacctgacataagaaggtaacagatctgccttgttgaccagaagcattgtttttttatgctcatcaatttcttgtgcatatgcctgtttcagaacaaatctccacgttaatgtttgatatggatcaggaaggttcaattaagagatatcagcaagttggcagagatagagttacctcaagatcagggcagcggtaaaacagaggatctctagcatcaacaaccataacaatctgaaagagaaaaaaatagccaatgatattttgcaattaactaaaccatgcaaaatgagctctaagagacgaaaaaagaaatcctggaaaacagacataccaaatcactacgttcaagcactcgccaaagttgtctccagatatcaaggttcttctcgaatggtgtcaacacaagcttttcattttcctcgaggctgaatgaatacagcagaacaagtaggcatgcataagtatatagcaataagtcccaacgaaaattgtacataacgaaatcaagccatacatagtatcctgagtaagctaaaatctgcttcaaaatgtgaaaatggatacatttttactaacaaaagtagtcaaaccaaaacgcattcaactgttttggtaccttattctataacgaacttacatctgcatttccaaagtaatttagctttatcaagtactcctttgagataaatgcaacaacttgtaacctcaaaaccaattatattgtaataacaaacaaatattgagagtaaaccaatgaaaacaacagtacgtagcttataatatgtaaccatagaaaagcatagtactagatcattgagaaaacaatcggactttgtagttcattgtcaacactaggaacacttgcaaatgagtaatcaatcctccatgctactaacagcaacaatccttctagtttattgtcaacaatacaaagaagaacgaagtaaaacagaaacaaacctcgcaagtttccgtcgccaagtgagaaaagcttgtttttcattagcatcaagtttctccacattcattttaggtgtccaatgaggtctacgaggaacttgaagactactagcatgtaaagcctcttctctcatcctttgctctttccattctttagctgttatgccactcgaactcgaacctgtatccctatttacataacataatcacaaaccaaaaaatgattcaatacaagcaaatctccaatttcacaagaatgattgaatcgagaagctcacatattgataggaacaggagttgcggaatcgtgatgaatcgcgaaaagacgttcagcttcttcggcttgttcgatgatggcatcgatgtcgctgacttcggtcacggattctagaaccttcttgtgttgatctttgtaggatttgcctttttccttggtttcctggatcatatggttatggtgcttcactaaggctcgacctagagatgttttctcgttcttccccattttcttctccggtgaaacctttgagttttccgattcagcagatatatatcgtgaggagacgattgagcacttttgtgttcttcttgtcgtgattttgattttgattttgatttcagcaaaactcggaaatgcagagagactctcgtgcgaaacaaataaaattagaaaagtagtattagcctattagatctttcaagcgaaatttactatctctactgcttccaatcgcatagatgtagatagttaagatatttcaagtgtttttagatacatttccttagatttataaaatattaaaaacttgttatataaaatatttcaaaatttttattagaaatatatgactttagacaatctaaaatcttttgtccaaaaaaaaaaaaaaaaaagacaatctaaaatcacgtaatagtaatgttttaaatttttatcatcttgtaattttgttttggacaaaaaatatgtatgaagagatgatagcaaaatgaattcggcactacaaaatttgttttgttttgatatatgttaaaagtttaaatgtattcacctgtgaaaaaaatatctttcaaatcgagagaatgattagttatcttaaccggtgttccaaagaaaaaaaaagattagtaatcttaacctttaaaaatggatattatgactatccatatcaaaaataatatatagttcaaagattaaaaaaagtatgaataactctagattatgatgttaaaaacgatgatatagtatatttggaacacataatgcctataaaaatacttatacgtgtctaaaatgattatttagttcaaaaacaacaccaaaaattgtgtaagagtacaattgaaaacgttaacgaaaatttaaatatactaaatataaacatcattgaaattatatattattgatataccttacatatatttgggaaagtttataaaatatgtaaaagaaaaaaagggtttataaccggattatatctaaccgaattatgttaaatatctaaccgaattatgttaaattttataatagcctaactagagactggaagcaatgatatcgagcttaaaggagtgctattgatttataaatttatatagaatttgaaaatctttattaattataaaattaaaatatatgaattttaaaataatatgtgtttatccatggatttgaatccttctattttctctttcaaatccatttaattttatttaaaacataatttggattctcaaatccaaaaacaaatgactaaacgaataacaaaggattttaactagtatttataaatcattgaatcaataacacatgatattaattaaaattttaaaatcaataattaaattacaaatgatttttgttcggattttcaattcattataaatctataaaccaataacccttcctaaacaaaaaggtaatgaaaatatatttttaaaaaaagcttattttacattcaaaatcttgttttaaaatctgtaagaaaaaaatgaaagcaacactatcaattgtttcctacaacactttttaatcgatattaaaaaaaaaaaaaagatagttagagcattttcattggaagtatctcaatgagatacccaacaaaaaaaaaatatgagaggaaggagaaaaaataggagagaaggagagttgagtttctcttccgagaaactttgagaaactattctcatccaatttggacaaatgtcatcatactattagttcaattattaaataataattaatatatttgttttagttaaaatattaatatatattttttttagaaacttttcttgtttttagatagagatggtcttagaagccttcattttcaaaggttgattaaaaataaaataaaaatttggaatatccacttgcgatcctttcttggaaaaaaaaaaaaaaatcatatgattgtgtctggccagacaagctagctatctcatttaatttcccaaaaagaaaatataaagcacgttcttcgtctcggattcagagaaactaatcttgaagatgagttcaagatctgacctcaaaatcaaacgagtttctttgataatcttcttgctaagtgttcttgttgagttttgctatggagggttcacaagtgaatatgtcagaggaagtgatttaccagatgacatgccactagacagcgatgtttttgaagttcctcctggtcataattcacctcaacaggttcatgtaacgcaagggaaccatgaaggtaatggagtgatcatttcttgggtgactccggttaagcccggttctaagactgttcaatattggtgtgagaatgagaaatcgaggaaacaagcagaagcaacagttaatacttaccggttctttaattacacgtctggttatattcaccattgcctcatcgatgatttggaagtaagtcttatcactttaaagccgtttttttctttggatttttggttaattttatccttattgtcagtattgatagttgggttttggttttgtgttttagtcgaatatccttaatttagaagtgttcttttacttttacttgttatatatggtcgtgtacagtttgatacgaaatactactacgaaattgggagtggcaagtggtccagacggttctggttctttatcccgcctaaatcaggccctgacgtaccttacacatttggattaattggtatgttaaatgttgtctttaagtttcatatcaaaccttacacatttgaataaaacctcaaacaactttcctatgtgtgactttttgttacgttccaggggatctaggacaaacttatgactcaaatagtacgttaagccattatgagatgaatccgggaaaaggacaagcggttctgtttgtaggagacttgtcttacgcggatcgctaccctaaccacgacaacaatagatgggatacttggggaaggttcgttgagcgaagtgttgcttatcaaccttggatatggactgctggcaaccacgaaatcgacttcgttcctgacattgtaatatttaaatttcttcctttcttttatcacttctagggtaattacttaaacttaacatgaagagtctgttttgtagggtgaaatagaaccattcaagccttttatgaatcggtatcatacgccacataaggcatcaggaagtatctctccattgtggtattccatcaaaagggcgtcagcttatattattgttatgtcatgttactcatcttatggtaaggaattaattttgaagaaacaataactatttagtagcttgttgattagttttgcatattatgattagggatatacacacctcaatacaaatggctggaaaaggagttacaaggagtgaatcgaacagagacgccatggcttatagtcttagtgcatagcccgttttacagtagctatgtgcatcattacatggaaggtgaaacattgagagtcatgtacgaacaatggtttgtcaaatacaaggttgatgttgtgtttgcaggtcatgttcatgcctatgagagatcggtatattcaatttacttgtcccgaataatattgatatttatctaaaccttccttgtcccccaattgatcctaaaatattgacgcaggaacgtgtttctaatattgcttacaacattgtcaatggattgtgtgagccaatatcggatgagtcagctcctatatacatcacaatcggggatggcggaaactcggaaggcttgcttaccgagtaagttttaccatattctgcaatcaataatagagtgactaacttgtaaccgactctgtaactaactctgttattgataatactcttcactttctttgaatatgtatgtgactggcttttgctatatctgtagcatgatgcagccacaaccaaaatactccgcgtttcgagaagctagctttgggcacgggttgctagagattaaaaacagaactcatgcttacttcagctggaatcggaaccaagatgggaacgccgtggcagcagattctgtgtggttgcttaatcggttttggcgagctcaaaagaagacatggcttgatgcattttaaagacaaattgaagaaggttttatttttgcagcaattctaaacgaataaatcagttagtgactgttttacgagggttgttattgagatttgattaaaacctcctctcatacagaaaaaagtttgttattaccataagtggttttgcacctatacaagttaatataccatttcactaatcttttcttttcatcatttctaattttcatcaccttgcaatcttttatcggttcaaattctgacacaaagagacatagttacattttaaacgaacagaaaacaaataaaaatgtataaagtatactacaatgttcttctattcacataccccacataaaacaattgaacttacatacaaaaaaataaaataaaaaacaaataaattactattaattctttcaaaaaacccaaaatactcataagaagaagaattcataggcttcctgatgacgtgtccttctgtgaagggcttctccaaaagccagccccatagaaacgatccaacatttcattttcaagcctgacgacgtcgtttaactcaccaccactcacatgacattcctcaaaaacaatctcagccgttagatcttcttcattcaatctagcgtgtacggtactttcgcttccttccgccgtcgctgacgcaagcaaaccatgtcgtttcctcgtaaaacgtcgtcgtttgcttcgcctccaagcttttttacaaaccgcggccggaactttatacacggctaaaaccattagattcaccaccgcgcatggacaacaacaccacacagccgcacactccgccgccgctcctcccgctacctctccaacttttcgtctctctttgcttaacgacgtcgtcgaaggaggagagtttctcatcgttgattcttccgatgaaactaacaacggggattttaaaatcacgtgacgagtcattgaaattaaaaaaaaatatcacgtgaccttggcaaaaaaaaaacacctctgggattaacgattagtgaaataacctttttctctcagatatctccgaggaaatagaatctagtgaaaattgacccatcgttgttgataaggtcattcatcattttgattctaggttatgttgctaatcaaatcataacgatgatgatcccaggaagagaaagattgagaagaactggtggatggtaaagtagaaataggggaggaggggatgaattggatgagttaaaaaatagctgtgtaaattttctaggattggttgtaattttcccgagaaaatgagagaaaattttggaaacgtttggtcagagagaataactgaatcagagaggttaaaaatggaaccgagaagatcggagaagatataaccagagatttgtttttctatgttcttaaattaaacaaacaataataaaatgattgaaaaaatcactgtcattttttcttcttttgaccctaaattaaacaaaacaacaataataaaaagtttgttttcggctttttctaaccgattttaatttgtttttttggtagaaattttctgatttttttgtttttgcaattattatattttctctgatatgacttgtattttagcatttgatgctattgagatcgtgggagtttgcagaagtagcggttatggtttaagtgctatcaaaccttttgaaaaattggttttgaatttgaaaataaatatgtttgtgggagttttatgactgataaaccagtggatatgaaagcggttaaataaaacaacgattaaaataaatattcaaagagttacacgtgctaatgaatgaaataaagatgacgatattgacgtttgcttcttgatttttattagtttgggtgtaagacataattaaaagaatataattactaatattgattaggatttttaaaaacatgcatacaatgatgatgaaagatattatatgtatatatacgattagataaatattgttttaattataaataatgttaattttaaaaatattttaatttaactactgtttgtaaccgcaaacgtttacagaaaaaaagagttcttgaaatatagcgattttgaatgatccagagcagtttccaccagtttgtatgatagttatcaataattaacaaccgatagcacctaaacacgctgcatttggagtggtaaaaagaaccaatcaaccccttaaatccctaaaatcacacaatacgtaggttatcttttagtaaaaaataattgtcaaatttccctttggctgcgatttgagaaagatagcgatttgtttggtttggtccacacgtgacgtgtgtgatattggtataaaaagttgtttttggagttctcttctttttgtgtttgtactaaccgtaaaattggttgcttatcaaagcacctaactattttttttctttatcactttctatctgtttaaattttgtgaacttccagctggtatgagcttatattagattaaagtataacaaaacaaaaaaatatataattaaatatatgagtcttggtttgaatggatctcaatcttatataacgaaagtatttgggtgaggatttttgaatattgataaagttgttgtatatcattttcacattagtgtgacattaggatttttgactggttatgaacgatggcggtcaagaatggttatgacattagtgtgatatctttgcgagaatacaccaacttttagttcatcactgagatctcatacatgactggtagaaataacaaaaatgccgtaaccattttttttgaagttttgacattagtgtgatatctttacgagaatacacagactcggcgactccttatcttatattttctctctatctctctgttcaatcacttatcaatgataagttatcatcatcatcatccatcatcaaatccatttgtcctaagatgatattttctcttctttgaccatcttttggcttgtgatttgctgatttcctgaatccacggtggattcttgatttggggttttactaaaccgtttatccgatttcagatcattctcacccttcgatatgtgtgacttcacacacaatattcatatgaactccagttacggtgatataatacaaggcatgactttagtctttagatagcttgcaatgatatatattaacgtactagatgatgctttgtggtatggacgtaattagaattattttagaaaaaaacaaagatattaaatatattatattatatttattttattgataacatatctaatatagtaaaatatgatgaattttgtttgtttagtagtttttgacatctttggattgacaatgtcccattcataaccaatttctactattatggaagataacacgatttagtaaattcaaattttggtggaaaagacagttaaatggacttaaccgcttgactaaaaacatccatatttatttagtagctaaataacagatattttaaaatttgaatacatatattttgttcagacattatacattatgttagaattacaatttctaatgatatttttcaaaaagcttgtctaattaaaacaaaaccagtactttcgtttcttaataaagaacaataattaacttcttaattttggtaaccgattgactgaatcttctatatgtattgtgataaaatggagaatgagcctgacgacatgagctagtgataatgttgctgcggagcggatttccatactaatacaagttcaccttgtccaacaaagacttcatttcccattcgatcttcgatatttgttatattagaatagatctttcatacaaatgaaagaaagagagattgaacgtttcgtttcttatatacttcaagagtgaagcaaccaacttaacttaattatagaaacctttgttctgacattttacctcatccgttaaaataaataaatatgggcctgatcggaaaaagacccaatcctgaaatacacagactctattttatcttgctccgttagaccaaaatgttattagctactaccatttcattttcagttctagttatttttggctgaattttaatttcccggtcatttttcttctactttgcctccattttttctcagctcgatctttctctgtgaacaaacctaatctggtaagtttttgtagagtctcttcttcttcctattacttcttctacgttttctcttggatctatcaaagcaaaccctagaattcaacttcgtaatcacctctttcgtttctactttgagttcaattaggaggtttgattgctatttgagtctaatcaatcgcttatctacttcgcctgacctaataatctctgggatttctgttgattttgacaggtgcgagtaccttagcgaggtttcgctatgtttatcaagcaggtacgaattcgcgaactgttcttactctattgttaattggaactgatgtttatctggtaaatgatctctattgaatttcctctgttgttttcggatttgattttgtgaaggttataatcgaaggatttaagagttacaaagagcaagttgctactgaggagtttagcaacaaagttaattgtgttggtaatgtctctctttgattcacttgttctgagtagtttctggattgttagtcgttctagtgtaaacttgttactgaaactgatgatctggtttgttctttgatgtagttggggcaaatgggtctgggaaaagcaatttcttccatggtgagattttagccttcgtgattatcgtctgtcatttctctttttttttcagacgttttcgatatttgattctaagtgaattctttgattttggatgcagcgattcgttttgtattgagtgacatctaccaaaatctgcgcagtgaagataggcatgcattactccatgtatgtctacaagtttgctacaggctttagtgttgtttcgttgagtgcttttcatgctatcctgaatattttctaactctgagctttgttattattggacaggaaggtgctggtcatcaagtcgtgtccgcgttcgtggagattgtgtttgataattctgacaaccggttcccggtaagtattctatttcctaaacttgttctgtctgaaaatcaggatgggatgttttcttttgtttggtgaaatagatgttcatgttagatactactgcattcgaccagtagttctgtcagctagatgctgaaaactttgttactaagcttggaaatattagttctgtcatgttttagtctagtgtataggttgatataagttaatttcatggcttcatgtcaatcagttatatcctaaagttcccttcaggttcataaaaccatcatcattttcttagctatgtagggtgtgtttttcgtaagacagaaatttgtaaagattagccacacctatgtaaatatgatattatcaaaacatacttgggtgctatacaaattgaaattaaaagactaaggctgttaaaaacctgtttagtcctaaatgcaatgtagttccaaatatggtatatatcagttgttctcatgatttgggtttatgcttctccactaggttgataaggaagaaatacgcttgcgcagaacagttggcctgaagaaggatgattatttcttggatgggaaacacattacgtgagttactgtatctttaattttgaacactctttgccattgccctatttcgtagatgggtgaacattaatctgacaaatcttgcagaaaaggtgaagttatgaatttattggagagtgctggattttctcgtgctaatccttactatgttgttcaacaaggaaaggtaagctcctgctagagaaaatatagttggattaatcctgtatttccaagcacagaaaaaagctactatgggctaacagatttctatataacggaattctacattttaaatcccttttatgtgtggtttgtttgtagatagcctcgttaacactaatgaaagacatagaacggttggatctgctaaaagagataggtggtactcgtgtttatgaggagaggcgtcgtgagagtttaagaattatgcaggaaacaggcaagttatcagtgtgcagtgatagtaaaacctctttaattttcagatgcatgcatggctaccttaaaaatctaatacggccaaatgacttgcctttcaggaaataaacggaagcagatcatcgaagttgtccactacttggatgaaagactaagagaattggacgaagagaaagaagaactcagaaaatatcaacaacttgacaaacagagaaaatcactggaatacaccatttacgacaaagagcttcacgatgctcgggagaaactggaacaggtcagccaattaaattaggcacacatgtttttaatctttttttttctcttgtttgttcagtgaaattgaggtttcttatgaaatatgaaataaatttttaatattgttggtctttctgttactggtgctagttatattaatgttttattgggctctgccaaactctgtgttttatgcacttctctgagtaaatgttattctattattcactcattgctgagctttacctttattacaaatgagctttcttgttcacgatataggtagaagttgcacgaactaaggcatctgaagagtccacaaaaatgtatgatagagtggagaaggcccaggacgactccaagtctttagatgaatccctgaaagaactgacaaaggagcttcagacgttatacaaggagaaagaaactgttgaagctcaacaaactaaagcgttaaagaaaaagacaaagctggagcttgatgtgaaagactttcaggatcgaattactggaaatattcagtctaaggtactaccaacttggtggcgacacatgtggtcacaagctgatacttactcacatttgcttaaaaactttgaagtatacatcaggacgaatttaaacgtcgcatatccgctaatgaatgtctaattgatattccatgtatatttggataatgtgcacttatgaagtcatatgttttttttcagaatgatgcacttgagcaacttaatacagtggaaagagaaatgcaggattctttgagggaactggaggcgattaagcctttgtatgaaagtcaagttgacaaggaaaaccagacatcaaaaaggtaagcatatatataatgtcattgtaacacggaaatagctttgttcatgtttacaatgaatgggttgtatgttgctataggcctcctgtttgagggaagtaatagtattaatatcctagaaagactacaacgatgattttgggtaaaagcttaaatgttgaattaaaatgtgaagttctactgtttggagtgatgcatattggaattttgtttctggttttctgttagagtcatcttacgttgataatcttgtttatggtttcttcttacagaatcaatgagctggaaaaaacacttagcattctttatcagaaacagggacgtgcaactcaattttcaaataaggctgcccgagataaatggctcaggaaagagattgaagatcttaagcgtgttctagactcaaatactgttcaagtgagtttgcataaatatggaagatgcatcgtagcataattagatcacatgatcgcacaatgtttaaaagttgagggtgtaaaatgtatttccttgatatttagatctctctatagtttcatcttttgtcagtaaatatatggaatcagtttcatgtgattggtgagctaatacattcattctactataggagcaaaaacttcaggatgaaattcttcgcctcaatactgacttgacagagcgtgatgagcacatcaagaaacatgaagttgaaattggtgaactggaatctcgtatttccaagtcccatgaactattcaatactaaaaagagggagagagatgaagaacaaagaaaaagaaagtaagaattgctgtcatttcaaaaattgttaagtatagtagacaatttttttgatgtaacaggataaatgttacctcagggaaaaatggggagaagaaagtcaactttcttctgagattgacaagttgaaaacagaacttgaacgggcaaagaaaaaccttgatcatgcaactccaggagtaagtgattggccttggtatcccttttcttgttgaagccattaatatggaggaagaatgttaatttattaagagaagttgatgcctaagatacatccaagtccttttagcgtagttataagttgacaagcaatgtgctggttttatatctctactggattgatgtaacttgacgtccattttcagtttttcgtttctggtgactcaacccattcattgtctcaggatgtaaggagagggctgaactctattcgacggatttgtgcagactatagaatcaatggagtttttggtccacttgttgagttggttgattgcgatgaaaagtttttcactgcagttgaagtcactgctggaaacaggtatgcaggaaacctactgagtttacctcacacctacaattactgtgaatctactttttatcttatgatctactcttgtcatctcttgttctacgaccagcctgtttaacgtggtagttgagaatgatgatatttcaaccaagataattagacacctgaattctctcaagggtggacgtgtgaccttcctacctctgaatcggataaaggcgcctcgcgtcaactatccaaaagattctgatgcaatacctctgctcaaaaagttaaagttcgattcaaagtttgaaccagcattgggtcaggtgttccttttgttccctgtccaccacttttatgcccatcaatttattgtcactttctgagctttttatgtgtctttctattctcatgtatgacactttatattgtaatgtgtcttgatgtaggtttttggtagaacagtagtatgccgtgatctgaatgtggcaacaagagttgctaagaatgatgacctcgattgtataactatggaaggttggaactgttattgcatttgtattcactttaaattccatttcaacatgtatttggtacgtgaaggctctgttgtactatgacaggtgaccaggtgagcagaaagggtggtatgaccggtggattctatgaccacaggcggtcaaaattgagattcatgaatataataatgcaaaatacaaagtctataaatgagaaggagaaggaactggaggatgttagaaggcagctgcaagatatcctttccataactgacttttgtttacttgttattgcattttggttttctgataaactacatcgtattgttcattgatgtgtgttgattgtagcgtttccttaacatgtctcactgatagatcagcagattacacagcttgttactgagcagcagagacttgaagcagactggacgctctgcaaattacaggtggagcaacttaagcaagagatagctaacgctaataagcagaaacatgctatacataaagccattgaatataaggtgccttttttcttacaattcaatttttttggagtggcctttagtgttaattatatcgttcccccatgttgtaaatactaaattgtttcatctgtttgcaggagaaattactaggtgatattagaacacgaattgaccaggttagatccagcatgtctatgaaagaagctgaaatgggaacggaacttgtggatcacctaactccagaagaaagggagcaattgtcgaaattaaacccagaaatcaaggatcttaaggaaaaaaaatttgcataccaggccgatcgcattgaggttcgcagtaatgaaaaagaaaagtttatatgtttgaattaatttctgatttgtttgcatttctttcgattgaagaagtctcatttatgtgcttttattttttttgattatgtctgattcatgtgctttcttttgtttttaaagtctgatttgtgcttttcattaacctcagagggagacaagaaaagcagagttggaggctaatattgctaccaacttaaagaggagaataactgagttacaggctactatagcttccatcgacgatgatagtttgcctagttcagctggcacaaaagaacaggaacttgatgatgcaaaattgtcggtcaatgaggctgcaaaagagctcaaaagtgggtcccaaacattctgaactactttgcttggcattgcttgatcttggtcttttactatttactatccagacgagtacactcaatgccattttgtgtgttttaggtgtctgtgacagcattgatgagaagacaaagcaaatcaagaaaattaaagatgagaaagcaaagttaaaggtagtataatatatcataaagtaagagacctgcgtttttctctatctaacaaaagtttcttgttctcttagacattggaagatgat

SEQ ID NO: 292 - DNA, 88383 bp, Arabidopsis thaliana
gaattcttggggggaaacttggggagaaaatggttacatgaggatcaagagagacgtggatgcaccccaaggaatgtgtggtttggccattcttgctttctatccacttgcttgaatacatgaagattgattgggtgggcttgaagtagttgaaagtattctgatcaaaatgttattttgagaaacattatggtccccatgttttcgtgcaaatggattgatatatatttttaatctgatgtgggtagaagaataaaagcaccaagtaaaagtttaaattgcttgaaaccagaaaaaaaaaaaaaaaaaaaacgtaagcacaaaagaaaacagaggactttagtcaatttacatttttcacaaatgaaagcatatattaattaagttggtgtaacatgttcaggtgaaccaagtgattaaaaatgagacatgacatattaataagcgtaggacctgaatcttattaaaaccggtctaaatctgagaaccggccttaattaggttttctctgttttcttaatctcgtaaagaggcggtgcctttctctctctctctcttaattaccaaggtacctgaattattatataagatcatcattacacaaacccgattaccctatcttctctctcgctcttggcttttgttccttgcgtgcaaagcaaccctttttctctctaactagaactcgaattccttctaggtttttttggggttctattttgtcaagagatttgatcataatggcgaaacctggttttaatcgaaacaaaaagatggtgaaacatgatgatcttattgtttcactgatgagtcgtatttcagaggatacgttgctagaaattgtcggacagagggtagagaacatgtatgccaaccacacagaatctcaaacgacgagtcctggaaaacaccaaactgttgatcctaatatctctggggatgcagtgccaataaagaagagaggtccttgtcaccgatcatcttcttctcccacgaagacaacaacatgtacgcgtgcgctcgaacaacaaagatcaatcacttccgtggaaccagtactacacaaaaccctaatcgaggtttagaaccgtctccttcttcttatgttactcgtcggtccaaagaaaaacgtcccattaatgtggaaaagagaagtcacaagaaacgcaaaatcatttgtcctttagaggaggaacccattcaaacaactccaccggagtggctcttgaacgtcatgaggagagaagagaacggttacaatccgaagttgatctcaacgaggcaactgtataagaccgatctcaaaaaaactgaagcacgtctctcagttccttttaagcaggtgaaaactccggactttttgacagaggacgagacaagaatcatacatgagaatgccatgaagattcgtgacaatggtgtgcctgtgaatttcgtggatcctgagctgaataagcatgtgcttgaattgaggaagtggaaaatgaaaggaaactggatttatgtctttgttaaaggttggaaaaacgtgcttgatgcttgtaagacgttgtttaaggaagacgacgtctatcctctctggtctttccgatctggaacaggcaaactctgttttgctctcacccctaaaaactctggccgtggaaactctcttcctggcggtgatggcgcttctacttccggtgaatctggtcaggtaccattacccattcctccggcaagatattctagcaactccggccaaggctgttcaggagagagcagctctagttcttcctaatcataactctgcttatttcttaagccacaagtaaaaaggatttagttttcaggcaattcaggcttggttttctttcttttttgttcagttgatgaaacagtggggttttgtccaaatagtggggtttctctttttgttcagttgatgatatgatgttttgaatttagatttcttaaagcttaactttctagttgaataatttgaaagttcttttagttatcctttgagagtttgtttttttatctctctctgaaatatgcctgaagctgcctaagtttacttatgcagaacaaacgagaacttgttttcttatattatcacaagaagatccatcaggctacaacaacacgcaacaagtgtaaagtttcttggctctctaaactcaaaagtctaagttggatcaatcatcaccataggccttgaaacaatataaggagcgttaaagaaaagatcagcttacaaccgtttctttgaaactttcctttccactttaacattgtataactcctccaacggtttctctgtctgcatacaagtcaccctaaaggctctctgaacagacaggttatttgtcttcttacatgtagtgacagaacctgggaatgatgtggtcattatcagacttgtgacttgtcatggctgcttctatccaatcttgtgaaacctaagatccacaatgaacttttgaaaacacatatcgaaacattgttgttgaagtttcgacacctctacaacacctcaagcttaaaagcaatgcaataaacatcaacgcaagatcacagcaaaaacagagcaaagaagaagtcgaaacagaacagagaaagagaagaaagaagagcacacaagtgatttgttaacccggttcatggcgttaacgagccactacatccggtcgggatcaacaaatccccaactccactatgaagaagaaggtgtttacaaatgatacaagtgattgtctaaagctcttcactagctaagattcattgtctctcatcatttgactacttaagaaactacccaaagcttacactttcttgtttctaaaacccccttgtttctccctccatagatctacattgttttcttaagctctctctttcggccgcttggcttgcgacatcctaccttgtgtgtcttcaagagttcttatagcaagacactccttagacctaatgcttctaccaaacgctccttttgcaatcacaaatggacaaagcgtccttcttggccagcgatgcacaaggctcctccttgtggtcccaaaagcataactcaaccagagattaatatacttttaactctagttagctttctttgattttccttgtatatttgaacatactgttctcatttcaacaattgtgatgttaaaagtcctcttaactcctgaaacagagaaagaaagtgaattttctaaagtctagtgtgtaaaagtgaattcttgtaaagcgtaaggcttaatcattctaacctcttgcaatagcttacatgaatcaaagacacatagttacatacactcacaattcacgaagtgagtaacgcccgtttgctatttcaattggaaaagtgaaaaatcatcccaaaattgaagaaataaagaacttaacaagaagatatgcgaaatttaaaaggttgtcgatttcgaaaccaaaatgattgtaagtgtgggtgagagtaacttcatacctttttttttctctatctagttgttgaatcttgagagccttaagacgttgttgaacttcaagatgagatgtttttagctgagtatgagtttaattatttcgatatgaagaagataatggagaagatttcagttgggtggagaagctggtggtgcttactcttacaatgccttgaagagacttgacaatatttggtccaacaaatgtactcaaccaacaggtagtaagaaacaattttaaccattcagattataaaggaatgtattcgcttggtgatgaaacttaagtttttctcatgattatggtattgggaataatctcgttggaatctttgacatagtgatttgtgggggtactttggggattttctagccacggctctatacatatcatcaatttgacccaaaaaggctttgtactctttaataaaaaaggtcaaataaggaaaacgatgggactatataaaccaagtcactctttatacaccacataaacctaaacccctaagcggctaagcctgacgtcatataccaaaaagagtaaacatgagcgccgtcaagctctgcaagtacaatctcatcttaactcaaaagttgagataggttcttagatcaggttccgcctttagatcgagtcatggtcttgtctgatagaaaggtactttcttttacttctcttgattagcgtctatagctagattgagatcgagtttgtgagatgttaggttcgatatccctgtctatttgtcaccagccatgtaggagtttcgtcccttcccctcccgtcgccctctctgtttttggtattcattggaatacggagatatattttcaagaggagaaatattgttttgttgtgatttttctctacaagcgaatgagtcattcatcctaagtccaacatagcgttcgataagatcttagaaaattattttaagtctaacatagcgtttgattggatcttaggaaattattctaagtccaacatagcgtagagaaatggaagatatcgtgaatgatatttgtagtaatggcgaaactagaaaaagcattggatatattctaggatatgcaaaagttatccttgaatatgttcacattaaatgttattttctacttaatgaacagttgatgatacaattattttctttaaaattgtttccgtgtaaccaaaacatatttcagtatatgcaaaataaaaaatggatgttggtattcttattttgcaaggcttgtaatgggtgttgtgtagtctcttttacaaggtgttgtgaagtctacatgaagcaagtcagctaattacatgcatctttcacattgtaattaatttgatttcaattttgtaattttatttgcttttgtgtaccaaagctgaaatcaaattgtttacaatttcaatataaatgatataatttttacattacttctgtattcacattccactcaatgattcaaatttttctatatacattcgaaagcttctcatgaatcatacatagctttgcatatttaaagtttacaactgtactggttatccaataagttagactcaagcgttgacaaatagagtaaggggaaaaaatatgataattccaagtaggcctttttgaactatatttcaaaattcatggcaaatgaataatgaggaagcgttggtacaagcggtgtctcaacatcctgtttccatggggatagaggggacaggagctgcgtttaggcactactcgggagggatattcaacggagaatgtgagacggattttgcatcatgcggttacaattgttggttatgaaatgagtgaagaaggaactaagtattggatggtgaagaattcttggggagaaaatggtttcatgaggatcaagagagacgtggatgcaccccaaggaatgtattactacaactagcgaatctttgagctacgttcgtattattattaaccaaaaccgatcagcaataattgtattaaacaaaataattcaacaaactaaaaagagagagagagagaaataggttacaaattaaaatttggagtctaaagaaaacatgatcccataactaaacatgtcatgaagatgaacaacactaaagaatattcaattcggacaccatcgcttggaaatctgccgcctggaactacgggaacttgttgtcctccacctctagtgtttccactacttccgctatcaccaccaccatctccaccaccgtcaccatcatcgccaccacgactgccaccaccttttccagccttatttcctccagagccaccgctgccaccacggtttgagcttcctcctccactttttccaccgcctccacttccacgacttcctccaccactgcttcctccacctgaagaaccacctcgagagcctccgcctccccctcctccacctgaagaaccacctccaccggcaagctgcctacgcacaaaatcacccgaaaacggcatcgtttctaccgttaaatgatgacgttttacatcaatagatgacacagaagcttgatcaagtgaaccaacggcttggatttgcgtatgaatcagaagggatagaaatagatgaaacattatgctacgcatttggatttccattttgtatatacaaaaccttacaccttaaacatcaagccacaactttatttaaacgattctaagtaaccgcgtgtgattaatcaaatcattttataactttactcttgcgttgaatatttctaatgcgactttcaaaagctgaagcttccttgctttgattgaactttactaattaggataaaacttgactttttttttttctcttgcgtctataatttgatttgttatttttacataagattccatttatgttttgtcgtcttagatttaaatttttgattagaaaagaacggtttcaaagatcttaaggtgagagtagaccaattcctaatttatcctcccgaaactagtaaaagcaaatttttgtgcgggtcaaattaagttttagttacacaatatcatagtgaccaggaacatatgcatatactttaataatggagtaacttgtcaactcatctttataatatgatgattattaacaacatgacgatcaagtttcttttattaaaaaaatagtcattcaaaattttttattgcaaaaccactattgatttacgcacggaattctattagtccacgtcaaaacggaattttagaccaaaataaatacaattgggtttgaatagtatatataaaattaatcaaaatattcgatgatataaatataacccttatgttttcacgtacggcatgcatttcatcatagttatgtgattttcttttaatcagaaaaattgtctctatacagaacatgctaacataaattaagtagacaatttggatttatatattcaaaaagtagaataatcatggagccatatacaatttaagatggtgcaaaaatggcgagttaaaccaaaaccaaaatgtgattggtcaatacaagacatagtgatcattagatcgcatttcaagattgaacatataataaaacaaatattcagctaagaaaagctagtgattgatccagaacttaataagcatcaaacaaatttggcattggccaaccattttcgggagaaccatgaccactacagcttcccttcccaccggtccaaagatctctcctgcgatagacattagccaaatggatgacagatccagaccgtagcccacctaagacagaagaccacttccaagaaagtgactgcatgggccttgattagatacatctccacagtattgttatatgatgtttgtctgagccaagccattggtctcatgatatttttaattgcttaaatcttgttttgcctattgcttttttactatttacttttcttattgctatattcttgccttttaattgctctccttactttgaatttttaaaacccctgacaccatttgctctatattagtttggatctcagaagtctagtgttgcaataattcgctctttgtggatttaaccccaataatactacaaaaacattcaaaccatacacgtgtagctaataccaactcgagttgaaaacttgagctattaagttttaaataccgtttccggacactcaatttaatgattccaattacactttagattccagttgaaactattgcttttttcatttatttttttcttttgttactaactcttcccttgctcgggatctttgatttcttaggtatatttttaggagtgaacgagacatacatctctttctttttgaatgatagggacatacgaagataaagagagtcagttgagtacttgaaaaagtttaatatggatcttaaaccaaatgagccatccctcttaaagagaatcagagaaggaaagcaagaaggcttgactaaatgagtaggaattgtgaaattcatattcttaacaaaacaggtagtgtggaccggtcctacttaaagtttttaaaaaaaatcatctgcatttatttggtcatctcttagcatttaaatatcagaactacttaatcccaatttttttgttttacaaccgtaatactttggtttaaacactcacagtgaattcagatattttgcaaattttttggtccacagtcctcagcaatgtaagagatatagccataaggagagctaccgacggtgaaatgacaaatgcatgataacagagtaatagtacggtggaacgaacccaacaatttaatgcccctcataaaatcatgttgactattttgcatactcctcactctttgtttttttttaaaaaattattttgacaaatatttactctcagtttgatttttttttttcctatgtaaattactcctctgttttaaaataaaagatttttaaactaacaaaaaccataaattaaaaatatttagtttaaaaattttaaaccaattatagaaaacattgcaaaatacaaatagtcgacactcgtcgacacaacaccagaagcaagccatcaacatgctgttttggtccctctaaaaaatagttcacgatcgtgtcctatctttgagctactctggagatagtttgtatgaaagtttacttgctcaatgatcttcatgttgcaggacgtaattcaacgcagttatacttcggataagtgattctagattattttttagagcatgaaataattttgttttccttccaagtcgcgcgcacatcaaatttatcattaggctaaatcctaacatctcatacactactgaatgaattatttatttatttacataaagttaaatttgcacttttggaaaacttatgtttacagatcaaaccataacatcgctggccaactgattatttggatcccatatgtactactatactatcaacaagttaattaacaccaacaaaaactattacgtcaaatagttctcacctaattgactagaagaaatcccacataaattcccatctatcgaaaagtttaattaatgtcatgcatggtgataagattttggatacacattcatttaacgcaaactcaaccaccatgctcgttctttgggacccattcagtaatgaagcaattgtaaaacttgtgactgtccttgtatcgttgaaatatctctatttacttatataataacacatcttcttcactatgtattcctcaagtgatctgtgcttttttccaatggctttgaggtcacattttctagctgtgttccttttctcagcaactctctcatcttgcctcgtagtctcggcttcgctcgtggaagggaaagtctcttgtttcgactgtcccaatgattatgattattcaggtaactttaatgtaaactcttttgactagacattgttatagtagacacttatatactcaaacacttgtgaataggctttatatctttgtgatacatataggaatcacggtcggagttagctgtagccacacaaacacgcggttcactgtaacaactgacaagaagggtgacttcatatcggaacttccctcaaagatcgaatcaaactgtgaagcagaactccaaggcagcgtcaagcaactttatgcttccaagaataacgttaagtcgaagattgttaagcttggcggtgacaaatatggtctctcttccaagttgttcttcttgaaatcatgtccaagaagcttcggatcttttagttcgtccaagaccgttgatttaccagttcctcccgagtgggggctggctccgaccagttattacgttcctttcttgcccatcatcggtatcccatgatacgcaccgttttaatccttgttttgtgtgttttatgtaatatattcaaattatatatgtgtagaggacatgtaactatcttagctgttcttttcaagttcatgcttgaactgaagtttgtgtgtgaacttagtgtctgaagatggtttatgttgtgacccatttatgaagcataattttaatatgaaatctgttattgtttactctaacaaaacctctggctctacgcgaagcttgtcaaaacttaagagtgagcttagcttctggtcgagctattctttgttcgacttatctgaaaatcaacatggattctaacaaatctccaccttagtattgatacccatgagatttacctccatggaaatatcgcatagtattatagttttttttaaaatatcagtattactttttattttgtgtccactgacataacatattgttcagactgtatcattcattaatcttcaatgcaggaaaaaggagtgggtggttctgctcttcaaataatccacacaattacatatattctattattatgactatgcttttaattctcatttctgagaggagtttagtgattggtagatcatcgatgttgtctctaatttattttataattgtttagttagatttgtatatcagagcagttaaatattttgatctgccaatatatgctaatgaaatttatcaagttttaactttaatacaaaaggtatcgagatagtttacttgatgttgattttattgccaaatgtattttccttgttagattttcgaaaatgcatacagaaaaacacttgaactcaaaagtatggcatacaatttcaagattttaacaacgagatcgactgtaacatttatgtgaacaaccatttatagaactttatttattttaccacataatatgcagtaccatatgtagctttaacatacatctctcttgtgctagaaagcctatttggcgatccttgaggaaatatatgtactgtatcttgtttacctagttccttatgtctataggatgcgatagatatgcatatggaggaggagtaccgtatccaccttggggaggtgatggagtagttggtgttggaggcacttgtaccggtggtggttttatgggagggctataagttggtgttggaggtacttgtactggtggtggttttacgggagggctataagttggggttggaggcacttgtactggtggtggttttacgggagggctataagttggggttggaggcaattgtactggtggtggctttactggagggctataagttggggtaggaggcttttgcactggtggtggcttgataggtggactgtatgttggtgtcggaggcttatgaactggtggtggcttgataggaggactgtatgttggtgtcggaggcttatgcactggtggtggcttgataggtggactgtaagttggtgtcggaggcttatgcactggtggtggcttgataggtggactgtaagttggtgtcggaggcttatgcactggtggtggcttgataggtggactgtaagttggtgtcggaggcttatgcactggtggtggcttgataggtggactgtaagttggtgtcggaggtttatgaattggaggtggcttgataggtggactgtaagttggtgtcggaggcttatgaactggtggtggcttgattggaggactatatgttggtgtcggaggcttcactggtggtggtttaataggtggactgtaagtcggcgtcggtggtttttgtattggcggtggcttgacaggtggactataagtcggtgttggcggtttttgcactggtggtggctgaacaggtggactgtatgtgggtgttgggggcttcactggtgggggtttaattggtggactataagttggtgttggaggcttatgcactggtggtggcttgacaggtggactataaattggtgtaggaggcttatgtactggtggtggcttcacaggtggactgtatattggagttggaggcttcactggtggcagtttaattggtggactataagttggtgttggaggcttttgaagtggtggtggcttaatcggaggactataagtaggggtaggaggcttctgaatgggaggtggttttactggagggctgtaaattggtgttggaggcttatgcactggtggtggcttgacaggtgggctataaattggtgtaggaggcttatgtactggtggtggcttcacaggtggactgtatattggagttggaggcttcactggtggcggtttaattggtggactataagttggtgttggaggcttttgcactggtggtggcttaatcggaggactataagtaggggtaggaggcttctgaacgggaggtgattttactggagggctgtaagtcggtgttggaggcttatgcactggtggtggctttacaggaggactgtatattggtgttggaggcgtttgcacaggtggtggtttaacagggggactgtaaattggtgttggaggcttgtgcactggtggtggcttgattggaggactatatattggtgttggaggtttatgcactggcggtggcttgaccgggggactataagttggtgttggaggcttgtgcactggtggtggtttgatcggaggactataaattggtgtcggaggcttgtgcactggtggtggcttgattggaggactgtaaattggtgtcggaggcttatgcactggtggttttataggggggctgtaagttggtgtcggaggcttatgtactggtggtggttttatagggggactataagttggtgtaggaggcatttgtaccggaggtggtttaacaggaggactataacttggtgtcggaggcttttgtattggtggtggatatatgggaggactataagttggggtcggaggcttttgtattggtggtggataaatgggaggactgtaagttggtgtcgggggcttttgtattggtggtggatatatgggaggactataagttggggtgggaggtttttgtattggtggtggatatatgggaggactataagtcggaggcttttgtattggtggtggatatatgggaggactgtaaattggtggtggtggtgttgtgtagctgggtggggcaccataaattggtggcggatgtgcgtgaccactatcagtctcatacttattaaagttttgcttcaccgttgcatctgcagcaactgaagcaccactaagagaaagaatgagtactaagaatctcaagaaatctattagtgggactctcatcttgtaagtgatttactgagaactaaagatacacactcgtttttgaggttatataatactcgaagttgtgagattagcttgctgaaacttgttgtgaatgttggtttctacagaatttacggtaggttcaaagactctttagtcttaggccagcttttggcttgggcagttatggttcgtgtcaagagacccttgaattactatgtccatcttctgctcatctttcaaactcgtgtaacatctctattctaatgccgtacatgtgtcgtgagatttggttttaaagcgtttctgattatgaaattatttgtcttgttatattgatttgatcccttaatggcagcttttagtttttgttttgtagtataaagaagattagaacaagctggatccttggttgcttgttcttcactcttaggtaatgaatatgaaaacgccttctttttcagtttgatgacttttttaacttataattatattgtttctcgcacactgtgtatctccaagcccctagagttatgtctacacagtttaagttaagaataaacttaaataatcttaaccttgttctcatagttatataaaaaaaatcttatagcagtttccttggatgaataatgttatcactatgaatctcttcctaatgacaaatatcaataccattgaagaagaaaacaaaaaaaattataacaattcttagattactctcattttttctgttagtcatcagttctaaagttttttatttatttctgccgaatgaggaattcaaggaaccaaaaacaaaacttaaattccagatttgttgcagggaacctgtaaaaatagttcaaatcatttgttctatatacaacgtaatcgtttacaccttcaaatatttttttgagtttcatagaccattttattcatgagctcgctttctctgccacactcatctagctactgtcgtcatctgcatgttgtagagtcactccaagtgtcttttcatatttgtatagagaatatcaaacttatttgcaatctggaagtgactgttacgtacgtttcaatctcaaataaggctgtattgttgttatggattaaaatttaaagatttgacatttataaccatatatatctttattttgatttaaaggctatgtatctttatgatttcatcttactccaagttttagagcaaggtcccttaactagttgtctccgatgcagtttaatatttttgttacttatttatcattaattgtcacataaagggaaaaaaaaaaaagtctttatttatttgccttggtccttcaagcttttttggtgacaatttaaaatgctcccgtactttctatgcattacactaagctatatactaatggtgaaaaggaagctacattaataatagtatatatctgttttgttgatttttggaagagaatgaacatattatctcactttaattttacttattatttttggaagagaatgcacatattatctcactttaatttgacttatcctatacttttctcataatataacaaaacattgttattttcaaagggaaaattagtctcctactttttggggccaaagtaaaacttagtctaataggctaaactaggttaattaatgacgaattacaagtgtggttagaaattttatctatttttatggcattttatttctacgccatgcagtttttacaaggtcatttttctggagttttaagatgactaaaacaattccatgttattttgattgaatgaaattaaacatctaaatatgaaaatgacattcagttcatttttaaaatgttatatgcacctaaaactaaagggatgaaccttatcttgaaatccagaaaaataaattagcaatatgttatccaaatacaaaacttcattttctaataatcaaaaagcttaaaccttattgtggaattttaacgataaaaaaggtattccactgtctaaaatagaactctatttgataatcctttttcctgttttacatagaaatatgaaccataattcataaacaataagactttgggactctttttcttttttttgtcaaaaggttggtattctcattaatgttaaatcggtccagaagaaattgaatttaaagcagccttggataaggcatcttctttgaggttgttctttcgtttcacaaaaccaaaactaatttcagcaaaagttaaagagatatggaggatgtcgtgaagaattcctctgagcttcatagggtgtggtgctccattgagtgctttgactagctgttgcaagtctgaagctaataaaagttttgaaatgccaagatgagatgcttgggactcaacttttggtatatcatcccaatgcattaagaaacaatatgttccattcgaatgaagccacttaacaccctagataaaacattcatcacacaacttcaattggctaggagtgaattgccacaaaaaaatatgattcaagtatgtgggcgtggaaatgccttgtctctagatatgaatggtatgttctatatctagtattaatttgtttctctaattaataaatgatcatacaacttgtggagtagtcgaggccatgattagagggattagagactcccagcgtgtagtaaaccataaaccaagcatatcctgggttagagctgaccatacttgagtggagtagggacgagagaaaaatagatgctcccttgtttctacaacctcttgacaaaaaaacataacttccattctcacttttaaagataaatgttttaacaatttatttaatatttatgaaatgtatcaaaacggcaatatttgtaaaataaatgaattaaagaaaaaaatagaggtactgccactgtcattggaaacttaaaaaaaaaaagaaaaaaaaaagcactagtaacttgatgatgtgaaatttggttttaaagttattaactcttaagatgtgtaacaattaaagccatcatgtatcattttctgcaaatcaattcccaatatcttcattcgattctaaggaaatgttttgttaatatgaattcattaactgcaacctaaagaaaagtttgtgaataactcagcgtgacctaatcctacaaaaaaagtataatgttccactcagagtcactggtcaaaaagtattaattctttaaaagaacctctttttgtgttgtataatgaactagtttggttataaacttataacttaaagggacatggttgttgacttaaacttaggtagaattgttttttatatagaaatggagcaagtcgatcttaaatgttagatcataaataaacttctcatgaaacctaaaagaaaaaatatataaacacccaaacccattccattcacttcaacaactcaattacaattatgcttatatatcttacatgcaaaacttcatcattatcatcatcatctctagctcctcctttgaatcttttccaaattcaacttccgaaagagataaccctaatttctagtcttcttcttctaaattttcttccatggatatcgaaaaggcagggagcagaagagaagaagaagaacccattgttcaaaggccaaagctagacaaaggcaaaggaaaggctcatgtatttgctcctcctatgaactacaaccggatcatggacaaacacaagcaagaaaagatgagccctgccgggtggaaaagaggtgtagcaatcttcgattttgttcttagactcatcgcagcaatcacagctatggctgctgcagcaaagatggcgacaacggaagagactcttcctttcttcactcagttcttgcagttccaagctgactacactgatctaccaactatgtcgtaagtttctctccaaatgttactcttactataggttatgccaagaatgtagtaaccaactatggaaatgaaaccccaaatgtgtatagtcgtactatagataataccaagactgctacgtagcttaacccgttgaatccaaccaaagccaggctagttgcaaagttcaagcagtagttagagagaaaaaatgagctacgttttaaataaggggggaaaaaaaactatcaacatgaatttcgagcaatgtgcttggtgcttattagggatttaattatggtacatgattttcaattatataaagattcaaacttatatcatttttttttattgttttgttttgcagatcttttgtgatagtaaactcaatcgtgggtggctacctaaccctctcattgcctttttctatagtctgtatcctccgccccctcgcggtgccgcctaggctattcctgatcttatgtgatacggtaacatttataaaaaaaatttgaaaataaatagttataataatgcaatgccaaacatacaaatgaaatttctcattttgtttgtggtttaacaatgaaacttttcgtagctttaaaaaaaagtacaaacgcaaacgctaaaataagtcaaggctttacttaagctcgagtaatccttatattggtcacaaattacaatgaatatgtttgttgagtaaacatatgacaaatccctctaactagttcgtacggttgtgttggtccaggtgatgatgggcctcaccctgatggcggcatccgcttccgcagccatagtttacttggcgcacaacgggaattcaagctcgaactggcttccggtttgccagcagtttggtgacttttgccaaggaacgagcggtgccgtggtggcatcctttattgctgcgactcttctcatgttcctcgtcatcctatctgcatttgctctcaagagaacaacctgaaaacttggattgatcctcttgattaaatttttatgtgctttgatattcatttgtgtgaatttttattaaaaggttcctatgtataatttggttttgttgtgtttggtaactcgggttttagtgtggaaaaatgttgtaaatcaatcttctatattcacatattgttttctttttccctatataattttcgtttcaaagataacaaattttaaacttatatctgcccggccataattttaattaaattagtaagggtgttaagatatcattatttgatgtaatatcacatgattttaaatatctaagtaactaactaattatatatcattatatttatatatttgactaggtggggctcaattggctccaaagaattttgtttgcatgcttaattattttgtatttggtggatgatttgatttgaaatgataaaagtttaatccattgtccttccacctcttctagcatttgatattttctcctattaattgtttaatatgtcttttattatctctatccaactcttgaaatattctaatccaactaagataccacatgatttagcaactaccacttaaccactttctcccaaacaatataatacaatacaatacatttaaaaacatatatgttcttctcattatctttttttttaattattactaaaacatcttaatagctcattatctttcttgcctctcaatgttttagacaagcttgcatcagctgttcatcaaagaatattgtgtgtgtaatgactcattgttcttaatcttagagtcgaggcatgaccaattgaaaggaggaatcgcatatggccctgttagtacgccctcggatatccatttgtatgcagcctcagtcatatgaatgccgtcccaattcacatacttcgaaggatcactacaatattcaactcctttactcccacattttatactaaaggtgaagttgtatggtcctcctaacccgcaacaagcgggcaaaggtctgtccatgagccctggtagcatatctagcttggttagtaactcaatgactaagcagcgtatatttaatgagggaacaaaaatgctaaccgaatttggatggttcttgcataaggcgcaacagagtattgtagtagtcaccatatatgatgttgacatgagggtaaagattcctaagtcttttgagttctgcttgaagctgctcgttgtggtatactgaaaagtcgttcagccatgtcaaacatcctgttagaggattgtattcttctttgtttggtgtttcgtataacgtcaaataggctacagagcatccaagtggaaaatttccaggaactaggaatgttcttgctcccatatcaaccaactcctggattcaagattcagtcccaaaagcaactaacacattaaattttcctacaaactaactaatcaaccgatacaaatcgatgaaaaatgtttaccgagatcgccgaagaaatagtagtgatcacaaggggaaccagctctttgacttcctcaatgttcttgcgatcaaataatgggaagttgtaatcattccctccaatttctccaatgagaataaatgcattttcaatcatatctctacaatctaaaacaaacaaaatcattacaacttaactcaattcattgcaaatacaaaatattattattttcaatggaaacaaataaaagcttgatcttcactacctggtgatgaggagccacaaagatatggtaaactctctttgaagctcttaagctggtttcctaaactaatattgctttgagaacaatgagttcctttctcctcaagaacagaacattctagtgctgttgctcctcccaccgcaaaattaactcctttctcaaagtttccatttttagatccataaaacggaggcacatgtggaatccctaagaattcagctgtgaacaaaagaaaccaagaaataaaatgctttcgtatttttcaggttttaatacatattaaaacaaaaaattattacagtataaaaatcaaaaactggaatccaattaaattgaaaaaaattgcactaaaacaaagattatgatcttgctttacagagactctctcaaagtttaatcaaaacatagccaattcaaaacgttaaaacgtttaaaataccaatgaagtcgatgatgaggcggccatcggagaaacgaccagacggatggtggaagaaggtttctccgtatggcggaaaggctgactcaggaagatcgttaggactagagaggccgagtaagtttccagtatcagtaatcgagtcgccgaaactgatgatcgacttgaaatttcggcatcgagtttgcgaggtcacgacagtgattaaaaaagtagatataaagaagctcaataacatatgacaatcttgagacgccatgcgagagctttaagctgactttatatctttctttcttttctttgtgttatgatatattattttcaaaatcttttgttttggaacccaaagttgagccacatgttttagcacttcgtcgaaaacaaagaaaaccatcaagtcgtgtgacaattggcagagatgggccaatgagtcatatgagttaatgagccttaagtaaaggtggggcaaaggaaatttactttgtatgggacaataaaactttgtatttgtattttatttgtttacactctcaaaaaaaaatgtgtttgcagattctttgtaccgtttcttgacttgtttatttgcgagttatttgtagattatgtatcgtattttgtacttgttttcgttccaatccaaaagataataaagaaaatgttattactagactgatttgtgtaagaattttttacaaaacattatatatagacttcaatagtactattagtgtattgattccaatattctatataaattagtgtattattagtataatgcttatacatcagcatcctaaatccgtgattttctttaaaaactcttataatgaaggagaatatgtataataaaataaattaaaatgacatttttgtgaaacggaagaagtattcagtaaaatacaccctaaaaatagactacctaatctatttaaaactacatttgacttagtatgtgatcgggtagatatgattttttgggattttttaaaaaaacattattttattattaaatcattgccaacaacttcttttttcagtattgttttttattatttgaccatacttaccatgttttcatacacctggagtcgaggctaaaattttaaattttagaagtaattactctaaataattgaaaattattttaatgctcttgtcctaaataggcaattatcatttgccatgcattacaatgtcaattagtatcttattaccagctcgagtcgtggccgtcttctgattatagagtgccccatttattattttgtcggtccactacccttgtattatttttgctgccagaggctgcaggccttgcatttttaattctctcttgagaaagagacttatcgattggcaaaatgtcgtcactttaaattgtatgcaaagtaacctatcttgttagtaaaaaatgcaacaaatttttgtttatacatatgatagacgataatgttttggatttcacaaaatgaaagagaaaagaaatggaggcacacgacccccttagggtttctagattttgaagggattttttggagatgaatcgaagaaccggtgtttaaaattaaaatgaatgataaactcatgaacactagattttttttggtttctctttgttgaagtaaaaagtttgaagtttttagggaactttctttttatttttaacatgttacctagtggccaattagagtcacattgatcgagcttaaatttggtgggatgtcaacaaaggtaaaagcaccagtgcaccactagcctacttgttaaagcaccattagcctccttgtttcttccaagatttttagggaattcatttttcttcaatttgtttcatagagtcaaagtttgtgatagtcgacgaaaaaaatctttgtaaaaagatccaaaaaacgaatttggcgtatatttttgaagatgatatacaatcaaagactcaaagtaaggaaggtaaaaattgtagaaaaccaagatgataataatatcttagatgtgtagaggatcaaaatgatatcacgaagatgtaaatatttgttttgtatttatgtagtttaaaatgatataactatggattttatgaatttgggcttttaaagttttgaacccaacgattaaaatgaaaatccataaaatctaaaacacatacaaaaacaatatccgcaatgatgagaacacgtgtcaacgcactgacgaaacatagtcgctgagtccacgtcagcatcttcgccgtctcttccaaccccaacgacggtttaaaaaaaaaaaaaacatttcctctcaatttttttttcaatcaaacaaaaaaaaatcatcgctcccaattttacattcttcttctcgccaaaccctaattgtttcgatttctgctacattcttccggaaacttgttctatctctgacggatctcgaatcggtattctcagctgctgaaatctccggtgagcttttccatactgtggtcaacttctagggtttcgattatcgccatttaatgatcgttttatttcatttcgatccctttcttttgattgatttttaggctaaaaatgtcaaattgatttgggttttgtgtgttatgtggtcaagtttatagctttttttttcccggtatcgtttccaagaaaatagaggaatttgagctaaattactctgcaactttgtttcagttttcatgtgtgtttcgatattggttcgatattggttaagtagagatagtaaaggtgttgtctttagggaatgtttcggatctaatttgctagaaactagaaagtgttgttagattgtctaagaacttggaaaaatcttgatgattgctagcggaatgcagagaacgttgttgtgtttttgtatcagaaggttaagtagagatagtaaaggtgttgtctttgggaaatgtttccgatctaatttgcaacaaactagaaagtgttgttagattgtctaagaacttgggaatcttgatgattgctagcggaatgcagagaacgttgttgtgtttttgtatcagaaggttaagtagagatagtaaaggtgttgtctttggagaatgttttggatctaatttgcaacaaactagaaagtgttgttagattgtctaagaacttgggaatcttgatgattgctagcggaatgcagagaacgttgttgtgtttttgtatcagaaggttaagtagagatagtaaaggtgttgtctttggagaatgttttggatctaatttgcaacaaactagaaagtgttgttagattgtctaagaacttgggaatcttgatgattgctagcggaatgcagagaacgttgttgtgtttttgtatcagaaggttaagtagagatagtaaaggtgttgtctttggagaatgttttggatctaatttgcaacaaactcgaaactgttgttagattgtctaagaacttgggaatcttgatgattgctagcggaatgcagagaacgttgttgtgtttttgtattgtgttgtcaatttgattggtcaatcttgtagttttttccgatatgggttcgaagaaaagaagggaatttgagctaaattactgcaactctgtttaagttttcgatattgattcacaacggtcaagtagagagatagtaaaggtggtgtctttggggaatgtttcggatgtaatttgctaagaaaatcagaaggtgttgtttgattgtttaaaaacttgggattcttgatggttgccagcggaatgcagagaatgttgtcgtgttgttttttgttgtgtggtcaatttgattggtttttgtgttgtttggtcatgtttatagcttcctcctatatcgggaaaagaggagaatttgagctaaactactgcaacttgtgtcagttttcatgtgtgtttcgatattggttctgtatggttaagtagagattgtaaaggtggttgtttttggggaatttttcggatctaaattccaagaaaacttgggaatcttgatgattggtaggggaatgcagagaacgttttgctgcgaggtggagaacggttggaaggaatccctctctcaagggattgttatcgtaggtcctaaagcaagaactagggacaaaccttgggatattctctaatctttcatctttgattaggacagcaaagacttaagaagcagcatgactcggattttggttcaaagaggttcatcaggcagttcttccaactctagccgtccttcttcctcatctagttcttcctcgggatcagaaacacagataaacaataatattccggttcctcctgttactatagatgaagaaattacggatgagaaacaagaagaggttactgtagttgaaaaagcagagtgttctgatgctaaagatgtagctgtggacagtgatgaacctgcggatagagaagatgatgaagggttggtagttgcagaaaatgttcatgttcaaagtgaaggtatagattgtgattctccagttagcggtggcagtaactctgattcaccacccgtaccagctccaccaccaaaaccttcttccactgtcaatcctggtagtaacagatcggttttgggaagttttggcgctttacgaattggaccaacacgaagagctgctgggcctcgctctcttgtttccagtaggagttcgccaactggatcacatccttcttctccaagatcacacagtgagaacgagggctataatagttctgatgagcatatgccatgctatgtgccctctcatcctggctctggcttggtaagtttgttttctgaaataaaaatgttttgactgctcggattcttagtcattatttaattcctctcctctctcacaggaaagagaacaccagtttgaagcagagattagatattcaaaaggatttgaaattaggcggatgttggaagatggaaattgtctttttcgagctgttgcagatcaagtatatggggactcagaggcatatgacttggctagacaaatgtgcatggattacatggtaattttttttcttttgtttcttctgaactaggttgttttgacgaaattttagcatttgagaccagaacatgagctagattaggaaactgacttgcacttgaaagatatattggaacaacgatacattaagtaaagtttctaagattgtactttatggataggctattcaccttgtttggtaggctgtgtgttgcgttcttagtttctagtcaaccatccaccaagaaaggaataatagttaaaagcataaatctttaccatttgatggctaatatatatgactatgtgtttgggttcaagacagcatcaatctaaaggtaagtggagtaaaacaaagagagtaacaacggcatgtacttgtatgcgttaatgatatacattttaaacttcggtattgtaaatataatcatattttttgcatgtaccttgttttggacggagcacagaattactgtttttagtgttaatggtaagaacttgtagaacttactggtttcacaatgaatggtttaggaacaagagagggatcacttttctcagttcataaccgaaggttttacctcttacttgaagaggaaaagaagagataaggtgctttgctcttatccatggctgtactttgttagccttcggttccaacaatctcttttgaaacctctttgatacaattgtgataggtctatggaaacaacgtagagatccaagctttagcagaaatgtacaataggccaatccacatttactcatatagcacaggtgcgattaagattcacattatgaaagctctttatgttctttagtgtaacaagaaatttatgaaacaaaatgtattgctttttcttacagagcctatcaacatatttcaaggaaactacagcacggatacacctcccataaggctgagttaccaccacgggaatcattataattctttggtggatccacatcggttgacagttggtgcaggacttggatttagtagccttagtggggtatgtatagttaagctatctttactttttctcttctttgttcaactgatgcaatcaagcataattcaaatttgaaaggtagcggatctttgtttttttgaaattatatttcttgttttgaatccagagacacgtggacaaggaacaggtgaaagctgctataaaggctcagcaagaacatcaaattgataatgcaagttacccgttcccatccgtaattagatatactaatctgacttgagtgtgttaccgcttacgtatatgtctctgttccaggcgctgttagcagaagggagattttactctgaccttgagcttacggaaaaggaaatagagcggtcggtaatggaagcttctcgtgctgagtatcttatggaatggtctaagccacgaattggtccaaaggaatcatccacctcgaatgctgagacatcatcttctggagctagtaagtatttttttttttttttgaatctgttcacctagaatatacttgaaacaaagcattttgaggctttttaaattttgaagcaggaccttcaggcagcgattcgaaaccagcagaggcagtaaaagaaaagacggtgctgagcagcagtatcgagatggtattgtcgatgggatttagctacgcacaggccatggaagcttatagcatttttggggatgacgttgactctatggtctgttatgtactggagacgagctgtggcggcaacaaccgacgcaaaggcaaagccacggaatagagaatgtaacatgaattgctctgtattaatagtatatgatataccaattcgtattcctatcaatggtgggcgattacccttatcagaataatgaaaaataaacttgtgcatccatgacatgatgtatgcaaatgtttgttgtttatgtacttagttgtaaaagttgaataataagagagggaaaaagaacacttcttttgcaaaagctgacgaaaagggaaaattttcagtagaattctactaagtactaacccttgcgagactctcaagtttccaacacagaacaagtcaagcatgatattgtcgtgtcgaaattagacccaactcagaacaaacccagaaatatgaaagctcgttctaggattgttaatgctataatagtggacaagaaaagtaccataaagaaaaaaaatgttatctatgatgattgtctactttgattccaattcgatgacctttcccaagtgtaaagcaagcaagttttcaattctcaagtttgtattgttatatgttgttagtgttaaaccatgttgaaatggtgtctcatcagagagaagaacacttaccttcttgtgatatactagtgtgacaacaagaaatgaaaaagtaaaatatcaatgacttgtctcaatgatccaacattacgagctacaacaactctacaagagctcgtttgactcagggttgattctatcaagtgtattcacatatgtatagcttgaaaacaaaacaaaaagcttccgaaacctacacaatcgcagagattcatgtttcagttcttatcattattcacattcatcatggtcaaaggtaaaaagaatatatataatgtttggtgaaggagagacataccaaacccactggcttaaatgttgtgccattgctttgaagcttttccaaggctgcttgtttatgatgattaccttactcggatgtcttttggcggataaaatagacagccaaatgtcgacaggtccacagtacttgcgaaagatattaaggcttacctgatggacgtacaaaaaaccatgtattcttttagctgaatcgattttacaatcaataggagcttgcagatactcttaagttccgagaaaggaaagaaagacttacaagttcccaagctttgacatttcttcctgaattagtctgcaagaactttctgcatgtacaacaaagtgatgaggaatggttttgtggttttatgacttaaaggattgaaagaagtcagacgtacaatactccacgatgcacatctcggtgattgcaatgaccccaaacaccatagttatcgaatgttattatctgaaaaaaccaccacatagagaattagatgcagaaatatatctaagtaatatcctgaagtgtctttaagtcatactgtgtggatatagtgattagtgacttcttcttcgatgatctctgttagcaaatcgtggctccataattgcccaaaaccatcctgcgagagagtaaatagtaatatactcggtatgagatggtgaatgtaaagatacacatgtgttggggagatataatagaactactaaacctgcaaatttggatggtccagaatctttaactgttgaagcggaacctgcatcatgttcaatatatattagcaaaaacatgttcttcattacaatgacaagaatcattatcacagattccttctttatcaaatgggattaccttgagcaccgcacatgcccgatgcagctcttggtccctaatgcttcccataccatcagcgttacctgaaacaaaacaaattcatctttactatggaaaatgaacctaatggtttaacttaagtagatatcaatctcttctcttcaatgaaactagaaatttctcagtcctttaccaattccacaactttgaaaaggaaagcaaaacagcaacctagaaaggtatattattaccagtggagaagcataagatgtgaagattgcaggcagtggaagtgaagtagtttattgttggagaaaagaacctgtcaagcatgtccatgactcaggaaaacataagaagaagaacaatagtactaatcttaacatttcattaaatctcaaaatcttacattgactcatcatcaggatgtgcgataacaaacatcacatttttcttccctgaaatcaaatacaataataagatatcaaactctgaaaaaaaaggataagcatttaaaagatgaagttattaatcatcttcgaaatacttgccatcatcaagaatagtggctctggagatagatgtagctcggaagaaaattttgaagaaagaagccacccatataacaacaatcagagatagaaaaacaacaaccatctgacaccataaatgatattgaatcaatacaaaattgtcagcataaatggtcagtacccaaaaagaaagtcagatcaagtccaacaattataagtcttaaagtgtttcttgatggatcaacttcatccaaattaacaaaatggtaaaatcatcaatgtggatttgcagaacatagcttctatataagtcgaacttaactcatttcaggtgaccagatcaattaaaaaatgaagagagcaaacaaataaacaaaaagattcaaaatttgtaagcattcaagctcacattcggaagaaacccttgtttgctcaaattccagattcatgagtccacatttcagataaacataacagaaacattttcacattcggaaggatcaagctaagtaaaatcagagagtggaacagctaaaccaaagaagagaatctatcgacactgagaactgagaaagtaagagcttgatcgatggcaagaatgaggaaggacgtgatggctgtagaagcccatgaaaactgaaacaaaattgcagtaatttagctcaaattctcgagaaaaagcattcaatttgacatttttaaactaaaaatcaatcaaaagaaatgaaacaaaattttaataaccaaaattgacagagtgtgggaacactcaccggagatttcagcagctgagaatccggaagaatgtagcagaatcgacgattagggttttgctctcagggagcgatgatgttttgtttttttacagtgtggttagaattgctgacgtggacttaaatttggtttattatatggtaaatggaacggaagaacaacagcgagaataaagttcatagagtgtgatttcgccggcggtgagatcgcggcaacagccacggcttcaaaagaaatgctcacccagttcctttatcgctccttcactcctctcctcttctccagatctttctcctctacgcttttcgttaaaggtctctctctctctctctctctccctcttcctctgttattatctgcgacttttctgattcttaatccttctttcacgaatctaactacccatttcctgatttctaattccttgaatcgggtatgtcctcaattggtttttgaggtcttaaaggttgtgactttgactgtgccaatttggttagagatagctattgtgtatgtatgctgtgattgtaccaattcttcttattttgatagaaacaacaatagggtatgtgtgaatttactgcttaactaccacatagtgtcttaccaatctaaaagtttcgaactttagatgtaaaagctttgtgtctttgtttgatctgtgtgtgacttgtattactgtcactgaactgaagatttttgctgcaggcatatctttctcaagcactgaagaaacattaacccaagcattttctcaatatggtcaagttctcaaaggtcagtctctaatcccaacagcaatttagttgtacaccttcacttacatatctctttatctttatcagagttagtttgagatagttaagagtctatacacttgtacataaggttttcagtattttcattcattctgattgtcttcttcaacttttggttgctttagtggatgttataatggacaaaatcagatgcagaccaaaagggtttgcttatgtcacattctcatctaaagaagaagccgagaaagctttattagaactcaacgcccaggtataaactcccttctccatttgagaattcattgcttgaaattctatatctcagataagtctaaagactccattcgaatcgattttcgtataaaccctttcacagtattgatctttcaaacttatagctttctcctgttatgaagaaaaagatttgataatttacttgtgaatcccctggtggagcattagaacaagatatgttagataatggaactattgtcttgagataatctaaaatcgtcaactcttggaactggttatgttacttagtcttcatgaagtcttgttatatggatcacagttggttgacgggcgggtcgtgatccttgacacaacaaaagctgcaaaacacaatccaccagacaccaagccaaatcatgcaggtggtgatagctgatacttctcttttgtcaacttgttaggttaaattatgagactcagaaaaccttcaaaccagtttcgaggttatttggatttggggagttagttgtatcgaacacctagagttaggagctttgagtcatcatagaccagttttgcgttttgcgtttgatcatgtatacaagtcacgtgacttgagagtctttgagtcttttggatgattatgcctcttcttctttgccttcacatactaacccattgttctcttgatctattcactagtttcttcatgtctttggtatctacttctaaccaaaagatcgcttaagaactatctaaagcttatttacttatgtggaattcgccgtttagggcattagttgtgttcatagcatgactctaattttctatatacatctatggaagaaccacattttatttctgaagatttcataaaattggaatgataaaacaaagatgtttgtaagaaaacgaaattagcctaagatttgtattggaagaggtagtttatatatctttgtccacctgaatgccttataaatatttaaaatacttgtcatacacaacaacatggatatagtttatttctcttgcaaatttgatatagctttggttgatacatatttgatttattgatcatcaagtaccacattgtccacctggtcctccataagagaaggatactctattatgctggttataaccccaatacgttagtctataaattggtaagaatctgcataacgtcttgttctctgtttttcaaaatcaatggtttcatagttcgaattcttaactttgacctttgaaaaatgtgaacttttataaaaatcgtgagacggaaaatatccatttcccattgggggactaaatccgtccggagatggaaatgtatttcctccaaagcgtaccaaagaagctcctttgtttaagtgagtaaataactctttaggccagtaaccaacaactcggtcaaatattcttagtatccagtttccgctgaaaccatcctaaataattttaaaacagaaaaagacttaaaacaaaatctgtgaaatttataagtatatatgtgatttgaagaagaaacactcaaggaatcttaaaaatttcaagaaattctaattaggatggattggagtatttcaaagcctaatttaaaatttaaaattataacctacgttataaaaatagagattccaaaattctcgtgaaataaattattgaacatatatgaagtagataattttttacctgaaaaactttcggattagtataaactgtttcgttaccaccataaacagaagtatcagcaaaaattgttccaatcaagggaactcgagaaacaataacgaatccaggacattttgtattatagcatccagttcttttatagccatctccctaatgaaataaaaagagtaaagtattattttaattttataatcatggattattggtttttaattataaaaaagaaaagaaaagaactattgtatttattggtttgccataattgagaaaataatgaatttactcactgtccagtatattgtaaatcgcgttaaactgtcgccatataatcttggatgcacctgtatcaaaattttgaaattcatgaaaacactttagatatttgaatataagtatgaaattactaaataattaatatgaagtacacattttgttaacaacttaccgccaaaccaaattgtatgctattgagttgatcacgaggtccattctctaaccagatttgatctttactgtattggttattcagtagagttaaattatgaagacttatcagagcgtctgctcctcgatagatgctcccatctaacatattttcgagtactgcaaactgtttaccacgtgaaaaataaggagtgtaatgtttcattacacaacactagaaataaggagaaaaacgctattttttgtgatgtgaaatttatacatgttggccaggatattcgactgtgtcaggatgaaagctctcagttccatttctctgtcttaaaattggtacagttccttttggacaatatttttcatttggttgatattcatcttttcttttaagcttttcatttgaactgaatttttcctaaaaccatagcacaagaataacaagattaagaaatattatatatagaactacaagattaactatgctctattacagaaactgtatttcactatacctgaatcttgtggtgtttcaacaatggatgttggaaagccggttgtttgtatatatcaacacaatcgaaatcttttaaaattgactgcaaaaaaaagttcttaagaaattgaaaacaccaaattttagagaatgatgaaaacaaaccaaaagttataaaatctcacatcaatgtttccttcggccacttgtgttaaaagcaaataagaaaacagacagagcactagatgtaaactcattgttaaatttatttacattttgtccacttataaatatagctatatatatactgatttgagtcaaatactaaaaaatgtgttgctattttgactaatatcttttttgctagtcatatcaaaccaaaagagtcaaacttattgctattttgactaataattgttttgaccaatctatggtaatttgccactagtacggatgatctttggcctcatcgggatttctctcggctatccctcgaagcaagttctctctatcatgttagctttgattctagttttttttgtctttaataaatcgaattattgtaaggattattttattccaaaacattgtaagaaacaaaattaatttaataaatcgaatcagttgtttgtaaaagttttaaatgcatttctcagtgattattgttttttcatacatttttccttgtgtgtgtgttttttttataactcaggtgatcgtaaaggtttatattcgaactccggtggccaataatactcaaatccaggtggcagaagcttttctctcctttaccactagaccaaagcaacttgatttttctttatatgcttctatatgatcagtgaactaagaggcaatcatattcttcagagatatatgttgtgtgtatccccaaaaaaaatgaaaactaccgtcttctctatgaccattaggaatgaggaagcaaaaggtgtgcttctccgaaaccccttatattgtcatttacttgacagaattgtagttttgtattagaaatgtatcttccaactaatttcattctttcgctagtagttcaagttgtgcaaagtgatatgtatccagtttggtcagaagggcattccttccctacaatggtcgcactcaacgttaccccgacccgcttatcaatccctaatgacaccatcaatcttcaattagcaaacattttaataaaaatttctccatgtttatatgtatcacatgatgtaaagatgcatatcatcctcgtgatgaaaatactaaaatggatccgactttcgctttgtatattgaagatcatatcaatgcaaaagcaatacaatacttttcatccaaaaaagttgctctttctgcttgttcatcaaatctttcaagtgattagatatatggttatatcacttttaagttttggggtatttggctctgatgttgaatattcaaaactcatatatctacccatactataaaacaaaatcacatttgagttttgtttccaggaaggatcaaactcggaaaaactcaaaatgagcaacttttttggtagcctccgtcaattccaagtcttctctgacctccccggtgcaagctccaccgagagactcgatatcctcgacgacgaacgccacatcatcggtttcagcattgcacctaacactttcttaaattaagtcataggtgtcaggtgcattccaccacatttagtgccgaaaatgagaatatgaatcagtagtcctaataataaaaaggttctattttgggaatgaacaacaaaacaaatattctatatcaagtgttggtcatgactcatgataacacaagttattcttaatcttatcttttgtcttccgcaacttgttagattttactttttgagaaaactagttggggttactgaaaatggggagttatttttaccctacacactgagtttgttgtgccatatgaaagagttgggagcttgagtattcattattctaaattagaggatttgcatttgagccgagtcatcatgaaccggttgctaaatctcttgatttgactatgtggaaggagttccataatgttaggcaagaagacctggagcattctatttgttttgcgtggcagagagagactcgtacttagcatgagtctttgaccatatgcacgtcacgcgacttgagaatctttgactcttgtggacgattaggcttcgtcttattgtctccacataatgagtcaatgacatattgttctcttcacaagtttcttcgtgtctttaatatcttcatttcattgcataactaaaacaccaattgttagataatttaacagtcggcccgcttgaagaacatattcataatctaagcttacctaggtgtattcggcttatagggtatcgactgtgttatagcatgattgtaatttatatacatctatatatggatcaatcacattttatctttgaagattccataaaattggaattatacactcacgatatgtaaacatttgtatcgaaagttttcaaagataccaagttgctagtcttttctacttcaactgatccagatttgccaaccaaagacccaaatttgtaacaattaacaaaaaccagtagttacttatatctcttaagaaaaaagaaatggaagatgaagtgtacatagaagacaaacagaattatatttgtaagacaatgaaattagcctaacatttgtagtggacgaggaagtttttatatctttaattgtgatttgacttcaattgcctccatagaacgcacatgacatgtgctaatcaattttgcagttgtaattataccaatccacaatatagaacttgaaccacgtttagctaccttcactaggggttagacaaatcaatctttacataaagaaagtaaattaagtcccaaaaaattaagtgggtcaaaagaatattataacttactcatcttctgtttcataatttgaactagtaaacacaatacatttacattagtcaacttaacttaatgtaataaaaattaatacggtggacctaaacatgagttacattttgaaacaaaactttagactgatctgttacttgtcgatgtattgattaaaatcttgtttcctgatcctataaattctaaaatttcttccatatctaaaaccatcccaagaatctaagtctaaagtctaaaccaaagccaagacaaacgaaaggaaaaaagaagaaagatgggaagcaaagctattgtatcagtcttgttaatggcatccctttgtggtaccatttttgttacacaaggagtagctgaaatgcaaaagccaccgatgtttccaggacttttccaaccaggctcacccgttgatcttgtaaaatgtatgtcgtctctctccaacgttgaaggatgtgtgctcgaaatctctaaatcaattttctccggcaaatttgaaaatattgaaggcgcatgttgcaaggcgttttcggccttagatgccaactgttggcccgaaatgtttccgttgaatccgtttttccctcctctcctcaaggatatttgtgcacgtattgtcccaaaatctcctacacataactaaaagcaagaataattgttgatctacaagtttagactagttgctagcttccaattctaagctttaaagttaacttttgttgttaaaatgtggactcacatatacgttttctcaataaagtaaatttttagcaatattcatacaaaatctccttatttatgacttccgtatttaaaactcttatatcaatgtgtctggggtccaaatatgtgagaactaaaaccacatatataatgacatgtttttactatcttgagtcatcggtgtcaggtgcgtcctaccacattaaatgtagaaactgagaatatgaatgagtagtcctaataagaaaaaggttctattttgggaatgaacaacaaaaatatatttaatatcaagtgtttgctctttataacacacatttacacacttacacaagctattcttaatcctgacttcatgagaataagttaatgaagatcatatgtagcttgaagatcgacgacgatatgacaagccatttgataacggtgcacattatgcggacacaaggtgcctcacataagattgatgcaaacttgttgagagatgtttcaaataaagggtttgggttagcacaaaatccagaatgctgcggttatgccgggttcaacttaagtggaagtgaaagactctagacgacgcagaggcttcgggttgcattttaaccaagatcaaatcgaagccggttttggttcgggttaacaagttgttggccggtttaaaggctattactctgttcttcttcttgtactttgttcttgagcaaggtagagagttgtaacgatggatgtataaccgcaactttaacatctactggattgctaactcaagttggcctgacaccagtgctcaccctacacttgaagtggccccaagcacaattataaattgtggaccattaacattaaggcaattagaaaaaaacaaaattgtggacatattatatgggagtggccgagtgggactcgaatttttaactcttaagccacgaacaatgaaagcaaccgactaaactaatggacattttacatatacgtgtggcctcaaaaaataccataaacacatgcttttacatcgaaacttgaaatcggtaaaattcttgtgaaagagttgattcaggtttaccttctttggctatcttattgtcatgactctaatatttgatgagataacaaaaaggtgaatatgtagaattgtagacgaaacaaaaccatcataacaaaaagaacaaacaaaacacaagtatacaacaaaggttataaaaaaacaaaaaaaaaaaacaatacaaaataggataagcttgtcgctgatataagagagggagatgaacgttaaatagttgttagtctttaggtttgtttgaaaaaacacatgacaagatattcggataagggctgcgattttatgtttcttctttggctccttttgttatggcttcttttgtttactctaaattgtcttcttttaaaaatttgattaaaattaatatttcactttcccattttcttttgttttttttttaatttcactttgcaacttacctccactttacatttctttttcatttttttggattaataaaagttttagcaccagaaacgttaattaatttatcccatagccaatcaatatagaactaatcttcacataatacgaaaattcaaccatacaaattatgtactatactagctatatagtatgtttatattcaattttgacttaggaattaaaaaaaaggcaaattgggactgtgattgattgcagccactcaaagattttagaaaattcaaagtgtgattggtaaaaatagagttaattttagtacatccttaaagtcaagtcactaatcaccccttaaaccttttaaatatgctccatgcgtaaaatcatttcaaaaaaaaattaagaagaatattttgaaataatttgtcgtttaaagtttttgtatatagattaagaaatcacaaaattttcatttaattttctcttttacatgaaattttacagaaaagcattattatttacaactaattcaaccatattaaaaacatacaataaaatataattagtcaaaaactgttaaataaatttaaacaaaacttttttcctaaaactacaaataaatttaaacagagagagtactacatataatattgttttaaaacttattttctattaaatgcaattgtacacaaaggttgtttccacttctacttaatttatggaagattgaggaaaatgattgaattttcagcaaaaatatctgtcaaacgtcttaattttttcttaatcaacccgtaagccataaggaatattacttttgtcaccttctaataactaacacgaaaataacagctcactcactaatcactatttcaaagagaaactcgcttacgctacgtcatctcatcttattatgtttcgtgttttctagaggataataataacaaaactatcatatatgttaggtatcttaatatatattaataaaattgtagtttatatgttaacaagaaatagaaaaataagccaaaaacaacagtagtgtatttattaaagattacacgacgtctaaatcaataaaataaaactatggattatggaacttggtcgaacataagaaaaagttaaaactattataaaaaaaaaatagattttgttacattgtgataagagggagtaaaaagaaaataaaaatcacttatatttttaaatgcgattataccaatactaatacatatcagattataccaatactaatatataccagatctaatcaaaagtttgcaaataaatatgtttgggggagaatagtattaggatgcagctcggtgtttaaagatatggaaatcgtaagtgatttaaacaaatatgtcttcaattcatgttaaaaaaaataatagtcatcatcttccaaacattaataatagaaaaatattaattcaaatgagtgaaactcagtactactcatgagtcatgacctacatgagtgaaacactctagaaacaatcatgcccgggaaggaaataaattattcaaaacactgattttatcttaacttatattttaaaaatgaattagtatgtaagaaaaaataatttgagtaaaatttttattctttaatcaaatttttattctttaatcttccttagatgataaatttgttggaatgtagtagaacatatatatgctgaacgttttttttttgttttttggctaaaggtttttttttcgtcaagctaaagggtttaatgacgtaaacttgaacagtataacaatatacatactaaatatttaactatatttaaaataataaaaacaattttgtttttttcaagttaaatcaccagttgaattcacaactgttgattcaatttcaacacactgaaattaatacatatgatcagtataaattaggctgattagcccaaattctgtgtcacttactctactataaactacatcctttattaactacattacgtaccaaaagagaaagaaatgtaagagagccaataattagaacaccggctctgactagaccaaaaaagtatttcgtctaaaagctttttaaccgaccatgaaaactaaattgttttgtcccagtcttttggttttgatatccggacaacttcctcatataccaaaatactaaaagcttgaaaagtcaaccaataataaagtaacgtggaaaatatgaaattcgttgcaaagataacgtgatctctctacgaagataagtttattctctttttttttgtcggcaccctatattttattcaaacggaattgaaaaaacaggcactggtagttattttaaattaataaatttgataaactaaaatatggagtatataatatataaattataaacaagatacatcactgaaagaaagaaaaaaagaggttcgtactttccttgattttttggaatgtcaggttcatcatcccgatcaagaaacaattatacagatttaggccataccaaaatttgatacatgcacggagaattggagatattcaatccaagtccagatacatgaatactagctaaaaatgtaacaatagaaaactacaaaaacagtattaaatcgcagttaaatatgacattttcatcaaggacataactaaaaatatagaaaatttcttctatatacaatataatggatatctaaatattatatatttattttaaaactttatataaaacactgatgtaacatttctcgtcggatctttgttctctgatattttatccattcacaagaaaaaaaatactatattttatttttctttatcgacaaaaagaacctttttaatcttatgataaaaatgaaagacttcataaagagacgtgataaaaaaaagaagaaaatggagcgtgtgtgtacgcgtgtgtatctactatgtatagaaactttagaaaattaggaagaatcattcaacttgaagtagaatagtctcaaagagccatggttgactgatcaaccatcgccttcttcatccttttctttattttctacattagtcatttaattcattcattatatatacttctctctaatttcttaatcatctcttcttatagtttttaccctaaagaaaatggcaaccgtcgatgtcatcaacggtgattcaatctcaactcttcattctgacataatccaaacccaaatcttgacccgactcgatggtccgacgctagcctccaccgcaacaacctcttcttacctccaaactctatgcacggaagagaaactctggcaagaactctccatcgacacgtggccttcgatcaatgatccacgtgttgtccaagctatctcctctttcccttccggttaccgttctttctttgctgactcgtacccgttcactgaacacacgtggcagtctgaaaaacatgatccaccgacgggattaatctcagccgttgatttatactacagaggagagattatatactcgaaggtacaagagatggaaacagagaaaggtaaatcaggatggttcttgtcatcaccgtttcgggtcgatatactcgacccgaaagagtcggtccaaacccggattcgatatccgggtggggactacgaagcgtgggtgaaagatatggaagagagcatgaaacttaattggatactaatcgatccgatcaagaaacgagcggcgaatatatctagtcgaaaggcggtgtcggcgcggcggaactggctaacgggggatttagaaatacggttttcaacggtagtgacggcggaggcggcggaagtggcggcggttgtgtcatgcgggtcagcggaagcgtggaaagaggtggatgaggaagtgggaggagaaatacacgtgagggacgtgaggctacaagtagaggacatagaaggaaaatgtatgaaaggtagggatagtttggtaattttacaagggttgttagatggaaagagatcgtgtaaagatgatgaagagagaagagctaaagaaaggtatgaagaatacgtgcgaatgaagatacaatggagagagaataaagagaggagagaaaaagctcaagacacaatttgtatgatctttgggttctctatgtttgtgcttttgtggagttttattttgttaaggtaaataactatagaaaggtacaaaaatacttaaatgatccaataatacatacatttctttgtcatcttttttttttcgttctttgaatttgtaataaagaaaattgttgagaaatatatacaagatatttggttagagaagcatgacgtaatactgatttttttttggtgtttttttgtttgtttatgatagataagttttgaatatatatagtcgttaaaatgtcacttttggacgtattacctaatctgaaaacgaaattggttaaagaaataagttgcggtcggaaattagtcagtgaaggaatttggcggccaaagaagattttttggtagttatggaaatatttttaataatttttttagtatagattaaaaattattgtttccgtttgttgcgaacgtgtgtgggcttagggcccaattcagtttgttagattagtaggggttcttttccggcagattagtgggttagggatttatagacttgatggtttgggtgaagaaaaaacacaaatcagtttttatgttaaccaaacggcaatatccacaggcaaacacacaacacatctcatattcattgcctggattgcaactatgagtataggtatgatcaaaattttgtaaccgcatttcgaaccgtaaccagactgttactaaatctggttaaaaactgtaaccgataactgaaaaacaaattagttactattaaaaaaaatactaaccgttaattattagtaactgtatcaaaatcgttggataatcgttgtaattgtgtatatgcaaagacaaaatatagttgtaatcgtgtatatgcaaagacaaatatcgaatgtttggataaaaattgtcaaaaaggtaaataatagatatgaaaaaatctaagctagaaaataataagattttttctcaaacaaatatgttggaatgctacattgcttgatatgaagaaaatttggtgtacaatatactttttcatcttattaaaagcaatacaatattttgggtaattcttaagatttcgccttcaatattaactatattgtaatcatcaaataacaataaccatatataatcataattgttgtaaccgtaatcattttaatcatagatagtggttaaagttaaggttaaaaaattttataactgtaactgatggttaataaaccgtacccgtaataaccgtaaccataatcatcttacgtgaacactaaaatttatatccatcacgtttagattaatcacccatctttcgaagcaaataagttccaatatgagcttagaggacataaaactagtttagagaaagttacacggatacaaatttggatatatagtttagttaggatatgattttattgattttattatatattttaaaaataactaaaacgttaatgatgacgtaagctaataaagtaatagattagaaattgcaataaaaaaatataatgtatttaataaaatagattcatcgacaaaaaaataataaaatagattcatataaaacttgtattacacaaaagaaaatatcttggcgcaagataataaaataattacaaagtgatttaaattcattttgattgccgtcaaaaacaaaaattcattttgataagttattacacccaaaaaaacaaaaacaaaaacttattggcatgcggggtacaaacaccgaggaagatatcgaaacacgtgtttaaaaatgaagagacgatttattaagcatcaatgagagaacttcagagctgggtttgagttctgtccaataatacataaccacgttatcatttttgtcctttactatctcattacactcttctgttattcgcccaattcttacagtcattgtccacgtcatcctttttccctctgaagccgccaaatatcaaaaaacacaaaacctttacccgaagcaaagtagctgcacacttgccatttataaggcatgtttcttcatctaaagcaaagtattttcgagttcctgagccaaaaagatcaaacaatgtctaaagaagctgagatgtcgatcgcggtgtcggctttgttccctggttttagattctctcctactgatgttgaacttatctcgtactatcttcgtcgtaaaatcgatggtgatgagaactctgttgctgtgattgctgaggtcgagatttacaagttcgagccgtgggacttgccaggttttacttcggttttctttctctttatgtttactttggttcactaatttgaatgtttgtgcctataaaacagaggaatcgaaactgaaatcggagaacgagtggttttacttctgcgcgagggggaggaagtacccgcacgggtcacaaagccggcgagccacacagctaggatattggaaagcgaccggtaaagagcggagtgttaaatccgggaaccaagttgttggaaccaagagaacgcttgtatttcatatcggtcgggctcctcgtggcgagagaacggagtggattatgcatgaatactgcatccatggagccccacaggttcttaaaactttcattttgaataggttgagttttaatgttttgagatatattgaaatttggatttcacaggatgcattagtggtgtgccggttaagaaaaaatgctgattttcgggctagttcgacccaaaaaatggaggatggtgttgtgcaagacgatggctacgttggccaaagaggtggtttggagaaggaggacaaatcctactatgaatctgagcatcagataccaaatggtgacatcgcagaatcatcaaatgttgttgaggtcagcttgcttttgaggaatgtgtcttttaacgatgtttaatactggtaaaattatccgctccaatcttaatcgaaaccacattaaattcaatatagttccgaaaacagaaccgattaagaaactaaaaccaaaccaacaccatagtaccatactataacggattcatagtacattagatttcactaaagttgttattttactaaagcagattctaaacttaaaacgtaacaaaccaatatatccaatgtttggtttttattttggctactaatattataactcaatagactaaaccaacacttgggctgaacatccttagttttcttgtactggtagagtttagagtttgtaactgaagttgatctctttctattgcgatgcaggatcaggccgataccgatgatgattgttacgccgagattctgaacgatgatataataaagctcgacgaagaagcgttgaaagctagccaagcgtttcgaccaactaatccaactcatcaagaaacaatatcaagcgagtcatcgagtaagaggtcaaaatgtggtataaaaaaagaatcaacggaaacaatgaattgttacgctttgttcaggatcaagaacgttgccggaaccgactccagctggagattcccgaacccgttcaaaatcaagaaagatgatagccagagattgatgaagaatgttctggccactactgttttcttggctatcttattttctttcttttggactgtattaatagctaggaactaaagctagttacgacatacatattatttatacataaataaatatagtatttggtctatggcaatatggcatgttgagctagtcttaacaattattcaaacttgtgtacaaaccaaaatttttatggaaaagagaatattttcggatagtaaacctttataatctgggtgaaagctttgggaaagagatgatagttccgtgaaaatagagacaacaaatttcacatatagtaaatgtgaataataccaccatttccttaagttttgctgtttgttgtattagagattgcaaagtgatattcttagttatatacaattgtaataaattatacaaaatccataagtaaaataaattattttagactatgtttagatatacaaaagtttcagttcaaaatataaacgcctgagaatcaaacaaatgttgtttgtagttttttatatttataaaatagtctaaaaatatttttcttacttatggattttttatactatattaaagttttatatatgtaaaagattactctggaacctctaatacaacaaatggtataccttcagaaaaaaataaaaaataattgtgtgtcatacaataaataaaaataataaggtgaaaagatttgctttctgttttttttggtggctgaaaaaaacaatggcgatgatgcttctgcaaattcctccttcgtcttccttgttgaacaccagaaaccttcaaatccgattcttccactcttcagtttcagcttcctcgaagaaattcagatgcagagccgtccgtgagaaggcggaggacattgataagaacatttcgccgccgtcttcttctcctcctcctccttccgccgaagaagttaccaagaaatatggccttgaagttggtctatggaaggtaaaatcaattcgattgcgcaatttctcgttttaattcgtaatctaaaattgatgattctatcgctatggaagctttaagtgtaagtaaaatagtgtttttggatgaacatgtgaggacatatgattgtttctgagctgaatgataggctaattcagagcaattttggtattagtagaagctattgaagctttaagtgtaactaaaatggtgttttgtatgattatgtgagcaattttgtagttgttgaagctatggaagcttctaagggtactaaaatggtgtttagatgattatgtgagtagatatgatcgttttcgtggtagttgtagaagttatgtaagcttttaactatgctaaaatggtgtttttttttatcaacaagtgagcatatgtgattggttagtttggagcatttttggaagttgtagaatctatggaagtttttgtgtagtaaaatggtgttttggatggacttgtgattagatattaagctctaaggatgatgaaggaagtgatggagacaataagaagaagaaatcaaaaacagatgaggctaaagagttacttgcaaagtatggtggtgcttatctcgctacatctattactctttctctcatttccttctcactctgctatgtccttgtgacttccggtgttgatgttcaagctcttcttctaaaggttactactttcacttcttgatcatactaagtttatgttttcttgatcttgggttgagtaaagctgattttgatgttttgtgtttaaggttgggatttcgacgaatgagacaggagagaaagtaggagcctttgctttggcttacgcagcgcataaagctgcatctccgataaggtttccgcctacagtggctttgactcctattgtagccaattggattgggaagaaagtggacaaggagaaggatgatgacaagtagcttactttggaggtattataatgtagatgttctatatattacttgataatcaacatacataatcctgtacaatcctcacttctctaccttgtatgtacaaaaaagattgaagcatatctgaatatgatgatgagttagaaagatacagaaccaaagagtggcagaatccaagttgtgatatagttttagacttgtctatttaatatgtggttggttggaaattacgacttcacgattcactaacctctagacatttggtaagtgggagaagtagttgtcaaatggttgggaatgatctctgtgatccagagcatatgacctcgatcgttttggtgatgcattttaacttgtactctagaacctcattatctcggcccatcaaaatatgaaaacattgggccgtaacaattgggccgtaatcatctataccatctatagttaattggatctttttatctcctcccttcctctttcactttcttccatggattactaaattccttaatcctgggaaaatcacaccaatcaacttttgtgaattgtaaccctaatcgattctacagcgaaatctacctatttcatgcttgggtttgattagtgtttttccagaatctgggacttcgcaggaattgcgctaattttcaatcgattttgcagaagtttgttgctcctggaatagaaatcgaagatgaagaagtacggattgcaaatcagagctccttcccagaaaaaacaatcatcatctcgacctccacttcgacccgcttcaatatttgatgaagaagaagatcacgacgtcgagaaggagatttctcgtcaagcaacaaagaccaaagctcataaagaagtaagcttttttcctccactgactcgagttcttgtttcttatatttccttcaatttgatctgcttgataagtgattgtgtgttttagattgaggagcagcataagaaagccttagaggaggatccttctgctttttcatatgatgaagtttatgatgatatgaaacagaaagctgttcttcctcgaatgcaagatcgtgaagaacgcaaggtaatgtttatctcttagagagcttaagacttgaagcttctgtagcttagggaatcaaaatctatgtttccatgttcttaagaggaatctatgatctgtgtcgggcttggtttatcatatgattgaagtataggaagccataacttagctggattttcttattacccttagaaaccaccaaaatcttgatatcctgcaataccctaacaactaccagcctataacccatggctacatatagttaccaaaaagtgtaaagcttagttactttgttttagttaagtagaggtgaagtttctgagcctctacatgcgtcagttttagtagtttcttatggtgttacattctctgtagttggggcactttaattaggtttcagaatgacttattggattgcttatgtttcatttagttttctttttctaattgcagccaaggtatatacagaatttgatgaaacaggcagaacgtagagagaaagaacatgagatagtttatgagagaaagcttgcgaaagagagggagaaagacgaacatcttttttcggataaagaaaagtttgttactggcgcttataaaaggaaacttgaggaacaaaagaaatggctggcagaagaaagattgcgtgaacttcgtgaggaaagagatgatgtaagttctgtttccttgttcattttatttcatgtttgtgtttctatctctctcgtctattaaactagtacttgctaggatagctgaagtcctatctttgtccttttacgtttctgtcttaagtagctttggtttgggaactgtgtcaaggtagtttgcatgtggtggcttttaggacatgatgggtgggtctagaaaccattttcatgtctctgtattagcaatggggagatatatagcatatagctttggtaaaattaaagtgatttgtttttatagctattaatactcatgtcagctcttttcctttgttttcatcttctgttaggttactaagaagaaagatttgagtgatttctacttcaacattggaaaaaatgtcgcttttggagctcgagaagtcgaagctaaagaggcagagaagctcgaggaacaaagaaaggcagagaagctcgaggaacaaagaaaggcagagaagctcgaggagctgagaaaagaagtaacaagggtagagaagaaacgaaaatcaccggagaaggaagtatctcctgactcgggagaatttggatcaagtcgtagcaaaagtttggagccactagaagcagagcaagcagtttctgaaaaggagatgggttcagatggcactgaagagagaaagtcatcaatcaaagaggcagcaaaagaagtgccgaaagccattaacgaccagaagagaagagaggatgcgatcgctgccgctaaagagaggttcctggcccgtaagaaggcaaaaattgaagagtatgtgcaacttggctgatttcagtccaatagttaaatcttggtgaacttgtcttcttctgattatcgaccaccctcttttttataagtaacttttcaagataacgcttcttatattacagggtctacttccattacaaatgcaataggtttgatggttaataaagaagagaacgaacaaagaaaaatcccctacgttgagatgcacattgtcagggtcagtttaaatgtcctagtggatcaaattgaatggtatataggaaaaagtaaaagttagaaaattgaggaaaaaggaaactttgaaagctagaatttgaggaaaatggaaaccttagaaattgggatttgacagagaattaaatggaaagacccaagcattgttttttagccactgacgaccaaagaaattcattctgattttttattcctgactagtgcaaaaaatctatagctataaacgaacctattggcgattgattctgagatggaggaggcgagactctcgacgttaccttttagtgcaagttttaatccttcaaacccattagggtttttagagaatgtccttgactttattgggaaagagagtaactttctgaggaaagacacggctgagaaagagatcaccgatgctgttactaccgcaaaggagaggttgagggaaacggagaagaagacggagtccatggatgtggagaaggttagaccctcgacattgccgtttaatgcaagttttgatccttcagatccattagggttcttggagaaagtctttgaatttgttgggaagaagagcaattttctagtgaaagacaaggctgtgaatgcgatcatcactgctgttacggacgccaaggagaggttgaaggaagaggagaaggagagtgtaaagcaagcaacagtaaagattaagaagtacggactgcaaattagggctccgtcacagaaaaagcaatcatcatctcgacctctacttcggactgcttcaatatttggtgaggatgatgaagaaaacgatgtggagaaggagatttctcgacaagcttcaaagaccaagtctcttaaaaaggtatggttataaacatataattacctcatcattctgactctgtttcttatgtacccattcaattttatcttcttgataagtgattttgttgtgttgatgtagattgagaagcagcataagaaagctatagaggaggatccttctgcttttgcatacgatgaagtttatgatgacattaaacatgaagcggctcttccacgaatgcaagatcgtgaagagcacaaggtaagtcttagagcctaacagtttcttagggtgtttacattctcttattggttgattgcttatgtctcatttactttattctatttgcagtcaagatatatacagcatattatgaaacaagcagaacgtagagagaaagaacatgagatagtttatgagagaaagcttgcgaaagaaagagcgaaagacgaacatctttattcggataaagaaaagtttgtaactggtccctttaaaagaaaactagaggaacaaaagaaatggctggaggaagaaagattgcgtgaacttcgagaggaaagagatgatgtaagttatttttcttttcaacgttttcctctgttctatttgagtctttccactactaaactagtgcttgttaggatagtacgagttttgtccttttcatttctgtcttacctcttaagtagctcaggtttaggaactgtgtcaaggtaagtagttagatcacaatcttttcttgttacaaccttgttgcatgttgtctagaaatcatttttcttgtttctctgttttagaaattgtgaggagatacagctttggtggattataaactcatgtcagcactttctaactttgttttcatattctgttaattaggttacaaagaagaacgacttgagtgaattctacatcaacattggaaaaaatgtggcatttggagctcgagatatcgaagctagagaggcagggaggctcaaggagctgagaaaggtagataggcttgaggagctgagaaaagaagagacaaggaaagagaagaaaagaaaatcaccggagaaggaagtgtcccctgactcaggagattttggattaagtagtaaaaaaagcgtcaaaccgcaagacgcatcaatcaaagaggaagcaaaagaaacgcagaaagccactagagaggatgcgatagcgactgcaaaagaacggtttctatcccgtaagaaggcaaagatagaaaagtagtagtgcaacttggcagatgtcagtccaacggttcaccaaattttggttaacatatcttcctgattatcgatcaacctttgtttataaacttttctagataacgtttattcaattgtaattttatttgcaaaacttgtaaaattcatcataaggtatgtatttcgaccactcacttccaacctcgctacagctactcatccaagtcattgatcgaacggtgcaaaaatctgtaatttgaagcttatgtctctgatttgaatcaagaacctatacctctctttcttttaacatagttctatgctctgtttttaagttatttcaaatgagttacatataatgtaattaaacaaggtttttttagtaaagaagtttacattctttcaaacaaaaataaatttgtaatgtcttaacgaaatagtttttcctcccattgtcacctttttctaactaaaatgtcttttacttacttttgtagaccatcttagatttccttattatctcccactagttatgaaaacaactgattacgagaaaactaatttgtagtaacatgagattgtggatatgggaaaaagaaagagagattgtggatactaacataaagtatcatgatatcaaaagaaaggtcatatatattattccaatatatgttttgtatgtatcaagagttcaaaattcttagacataagcattaaagatggaagtgttgagaacaagtggaccctgctctgatagttgcggagcttaaatcttccaatctgagcagaaccggacatcttacgtgcaaaccgaactctttgaacgagaagatcccactcttccattggaacactatatcggctataacgtgaccgtagtacataccgtgtctcacaagaaaagccccggtcggcttaccgttgtcgttattgtttgctatgaccgctgtccaaagcctaactgtacgaggctcctgacgcctgctttgcaaaaaaacactctctgtctcgaatttttctccgactaggacgtgtagacttatttttctgtagtaaacacttgacttgtagcttgggttggtcgatgacagtttcacctagataaagcaaatcgaaatagtaattatattagggtttaaaatagctttatacttttgtaaaacgaaaaaaaggaaattgaaaacacttacaattacacttgtgtttgagaggggatcaacgtagagatcctcgagcatgaaccgtggaactcgcggttggattgctatgtagttgaaggcaaagacacagattatgagtaaaattaaagccgcgggcacgccgaagtagatgattgtttttccatttttgcttaaacaacgagacttgtctgaataaacaacgcgactatgttttgacgccgccgcgccttcttctttggcttctgtcttcttcttcgttggttcttccctcttcgtcgttggtccattcttcttcatcgttgcttcgtccttcttctgcatcgtttagactttagattgctatgcgtggtttcttctctttaagctttaatggacttctttgtgtggtttttgatcatagtaactatgaaacgtaggtttatagagaaaagagggaggatagttttatggttttggaaatcttctaagaaacaagaatggtaaagagaaacaaaagtgttgaaaaggaaactggaaatgtatttttttttatgtggaaaatatgaaaatgttaaagtaatagagaaatagaaaacatccttatattcttttgttcttttttcttaaacaataaccaatattaacgatatagaaacatttttatatcttcacggtcatattagcgatattagtcgagagaagtcacgttcaagccctagaaaataactaattaatttcatcaatcgacattatttagctataaacttgatgtttctcattcctctaaaattctgtggtatatttgtaaacttatcttattcgtacgtagttgaaggtgaacaaaaataataagcatcaacatgaagatcatacaaacattcaatcccacctcttttcgacaatagcaatgcaaagcttatacttttttgtttttgttgcatatcttcttgatacctaacatttccttagatattgattgacaaagctacacggcttgcggatgcgttcggagaagatgcgacgttgctaagagtttgctctgttttctttgaatcccctgtattttcctcctctgttttgtagtcgctttagtgtcatttctttacgacccattttcagcatatataacttccacatttaagcaaaagaaaacatttccttagataatttcctttcctatgaaaataattgatctgtgaagaatgcatagaataaagtggagagtaacagatgatgaaataatgcagaaagacaaaccccaccaaaaattacttgtctcatatcactagaaatcctgagtggttacaaattaatcgcatcgatgaatcctgtatacattgcaaactcaggaattcaagatcctataatcctcccaaagaaactacatataagcattcagaacattatctcttaatcgttcaaaccccacaaaaatgtgtcaccacaactccaattagcaagaaaaaatcattgaagcagaaaaaaagaacatgttcctctatgaatcatcaccaattctccaataagagtaagcatgcatattggctagtacttaacctaacgataaaaacatgatccattctcaaaattgactcaatcatgacactgagttcccatctttcaacatcatagcagggcacaaataccatataacctatcatttgagaatcatcaatataaaactaacatgaactgactagaaccaatcgttccaaagacaatttcaagtttcattatgtccaaccatgtcaccatcaaatcctaataccacagtcatatcaccacaactctaaataccaagaaaaacatgaaacagaaaccagagtatggtcttaccaaaatataacaagttgagcaaaaacattctctactatgaatcatttaatcacctaacgaaacacaccaattccaccaataacactaaccatccctaatggctattacttaaccttacgattcaactacaatacaatctcaaaactaactcaatcatgccacaactctcaagttccaatctttaacatcacaccaaagccaaaaagtcgaaatccaaacataatcactaaaagaaatctttataacagtagcaatctattctcattgcaattatcatcaccaatagtactaatcaatcaacaacacatagtcgatttacaaaagattagtcaaagataatatccctaaaactcaataagttttgcatctcttagacgaaccaaccatcttcccttcaccactactcaccggaacaccaacagcaacatcatcacaatacacagtaacatatctcctcctccgaaacgcaccgtatcgaaacgtaacataagaaatcatcctcaaatcaaactcaacatttcctttaacacttctctctttaccaatagaatcaaccaaacgtccatcaacataagtaccagaaacagagagagtcgcattaaccaccgtttgatctttcttcccttgatcaaacggttgtaacctagtctcggatagagagacacgattgtaatacatagcgcaaagagcagtctcgtagtgaagtgacatctttgaattagggtttcgaaattggagttgaagatcccatttaccagagacttgattgttggagacattgaaattggagacggagagtgagtttaggttaacgtctggtagttgaggacgaacgattaggaagaagatgaagaggattagacctaggagtaggaggaatgttgtgaagacgatgaagagacggcggattatgacggcgcgtgggtttggttgtggcgcgtagtatgggttgtggttttggtaggggtaagcggttccggcggcggggtttgggtacccgttggtgggtggttgttgttgttgtggattcgggtatgggtatgggtatgggtaacctgtagcgggtcgtgatggatcttgcatagcttttgatttgttttttttggaatcttcaagagacgaagatgtttgtgatggtgaagaagaagaagtaaagggaagtgagaaattaacgcaatttaatttaaaaggaaatgtaaatttcttacgcgtgtttttctttcttaacgcggtttgtgtaaatggtattattatcaagatattctaggcgtggacataataaatcgaaccgaaagaatcgaattggaaccaaagtaaaaagaaccgaactcgaatccgaaccaaaatagtaaaatactcgaatggatctaaattgtagaattataataattagaatcgaactaaaccgaaccaaaatatttcaggtatccgaaaaaatccaaaatatactcttaaaaataatattaaaatattaaaatatccgaaaaatattcgaaaatatccgaaataaaatatcctaatggattctaaactttaaaaccggaaccgaacatagcaaaattgttttggttcctacaaagctcctaaactcgagaaccgaaagaatcggaaccaaactagaaccgaactggaaccgaatcgaatacccgaacgcccattcatagcttattaaggcggtaaggctacatgaatgtatgttgttttttaatttagtttttggatttgagattttagttttagatgttgctattagaaccaacccaaaaaaaagtagattcactaaattataagagaactaaaaattgaagaccttgaatgtttgtagtttttaaaatggttttcgtttttttgtttttggtctttagagtaaattttagtttcttcagaaattgaatcgattgtcaccaaaagattaattgaatagtatgtgggctcactatactgaccacgcgaatctagtgaaggcacactgctactttgaagatggttatcaaagcatcaccctaatgcaccctaatgctgcaattccacactagtgcgtgcttaatccaaccgtagattttcaaagttttaaattgcttttttagcttaatttttctaatatatgcttgctctttttaggatgccacatgaagttgatctatggtgagggtggcgattaaacttctcataaggagaagtaaggaaaataaactcagctaaaatcttatactatcatacaaattttagatttcaaataaaatatttaagtagattagtttgagaagaaagtcaaatggcttatttataagaacaaaaaaaatagctcgaaaaaatgattaaatttttgctttgaattgtgacgcttgctccatcatatgtttgttagctcattgcatttggctatgcattgataaaagttcatgaagatgtgagatactaaattctcgctcggtaatacataagcttcaactctagctagggttcgtttaccatacaattatgataatccttcattggtatatctttttcttttatttacttttttcatccacaaactacattaacactctatattctcctccaaatatcaaaactattgatgccagttttttcgaacacactcatatgttaggtgcttcagttttaaagtttctaataacaaaactcttagatgtgcatgtacatgtgggagaaatgaaagtgtgcaagtaatggtgctcattattgacgtgaaacttgtccttaaatttcaaagaattctacgatttttttttgtatttgttgatcaataagatttttttggttccaactctataaaattcatttactattacactcgcataaattacgatgatattatgaaatgtattaagactctaacagtttaacagttaacgacaaaaatatctactattgtaaatttaaatctttctttccaactaaattgcatattttcggttccggtataatgaaggcctaaaatcataagctatattaatcacatggaagaattaaataaagaaacctgatcgatatggcagtagaaagaagtcaaaagatttggattttggattgcaacttttttcttattggtttatataattaacaaactagttgatatatattatatgctgcagaatcttacctccttttttacatagtttacactttttgtgtgcagctctcaactcaagtaggttaattagacatataaccaatgaacgtaataatatttaaaacttagaattgacctttatgaattcatcaatcagtctcttgtcgcttaacgttacactcgtcttttctggttactactctcttccctctcattgcattttccaggctgtttcatctttctttgacatcactgtatcggtaacgattcgacgacatcaataaatatattgttggccaacgaaaaatagacatgagtaataatttaatataatacttaccagtaagtttacaataattttgattgtcttctgatctaataaattgttggccaaaaaaagacctaataaattcgtggacttggagttgatgcagatctttagcagtatggtggtgttgaattcaatctttttggtccgaatgtctttaaaattgttcttgatattcatatccataaaattaatcgaattccggattatccataataaaaacaaaactagatacattttctaagtacattaacacataagaatatcatttttgtactaccaaaaaaaaagtaaaaacttatgtccatggtattattataattggtggtaaatcagtaaattagttgttagcaaaaaaataaaatttagttaaaaagtagtggcaccttattggcccaaaagagtaacgaagcaaaacggaatctgaaaactgttaaaacttaaaagaatagataattgagatataatatcgtatgatcggacggctgtgatctgatgccatcggatgggcacgtgtcagaagtgtactccaggtatcattctctctgcctcatgacatcagccgatggtaccctcgatacggcgccggcaaggctcatataatccattcaatttatgttttttctgctagcaaatagatttgccattgatttgatactctcaataatattatccgattaaggtatcatccatattgttcaatataatttaagcatataactgtttccagattaaacaatataatttataagagcaactgtaatactttactttaaaagttttcaaatcagaatctcttttctttttctacaaatctggaaacaatttaatccatattgtttttgttttttttaccttctcatatttagatgctatttattattgtgacacaagcttagtttaatttcttgttggttacatttttttttctaaatacacaaatattatatgtttaatattatttcacacatttcttagaagaaatctaaatacatgaaattatatttattaaaaagaagtctaaactatatatgtatttaaatggaattttaaatatgggtagtaatatagaaacaccattgatatattagagtatgtgccggtgccgtatacatactgttgtattatagtaacctatatatggtatacctagtcaatgtgtacggtatttttcatatgtattagttgtgaacctccacagcatgttagacttaggaattaattataactgaaccagaactttgagtctaattatacccctgccgttttatacaactttgaatattgattccagtggctaatttaaataagttaaaggaaacaaaaactgcaagtaagtgaaaaatacacaattgtaagtaaatgttagatatttaatttatttatagctaaatcatgaacaagttcgtataagatctagatatatgtaccatataccttttctatgcccactatatatacttactacacataatatataaaccaaccaaaatatttgaatagttaataactatgatacacgtttaggacaaataaaattaaaaaataggagatcccatttctcgcccttgtaggcttacgctataaattggactgtccccttctcatttcattaccaaagtaaagaacagtttctatatttctctctttatctctctcactcagtcactttctctctaaaaatggattcgaagagttttctgctactactactactcttctgcttcttgttccttcatgatgcttctggtctcactctctctttcactcctctatatgtctataactcatgtaaatggattcttataagtctcaacataacttttttttgttatttactatttcaccagatctcactcaagctcatgctcacgttcaaggactttccaaccgcaaggttatcttcaacttgtactcattaaggcctctcaatattcatgtgttatgttcatgtagatgtccggtccagttcaacaactgtttcattgctttagttgtcacgagaaatatttgtatatattattatggtgtgcaaaacatagtaaaatgttgttcaattggcagatgatgatgatgaaaatggaaagtgaatgggttggagcaaatggagaagcagagaaggcaaagacgaagggtttaggactacatgaagagttaaggactgttccttcgggacctgacccgttgcaccatcatgtgaacccaccaagacagccaagaaacaactttcagctcccttgacctaatctcttgttgctttaaattatttcatattgtaaattactttctgctttatcggttttaccatttcgggagtcttttttgtgtgcaatctgtttcgtttggtaagcttgtagtttcatgaaagtgaatgtaagatatgcattacgtttgttgctgaagtgaatgtaagatacgcactattatatctcatgattttctaagaaaaccctcttaaaacgaagatgtctatagcattacgtttctatttccatataatacgttaaaatttatggtttttacgtataaaatgcaaaataaagacacaagtatatctccaaagcaatgtaccgttgggaaaatttattagtacgttttcaattgtcaatgcaaataattaatggatgtgatagtcacaattaaacatacaataataaaaatgatgatgatgattcgatgatgtggtgggaaggataaattaaaccgactttggggcagtgacaggcagtgtcagtgtcaaagacaaccatttgtagtcactatttctatcgaaggttgcaaattgaatggtggaggagtatcaaaacgacacacatacttgaaaagatattttaataatataaaaaaattggtgatggcgtaataacaaacctagagctaattattatccttaatgataccaaatctatatgatacgatatttgttttaaaaagagtaaagactgacacttgagatgtgacactggcgatttcgctcacgtcaccacttttcccacctcaaataacgcttacggctttatccattaattctaagtataattttaagtgtattttttcttgccaaattcaaatatatcttactaaatggatgaacattataaaattgttatcaaaaccattaaatgttcttataatttctttcgttcctccaatgtcatcccaagactttttgacctaatatatgatatatctaacttgctttggaatcgtatgacatatatcttcaaatacatatttcgtatttttttttcacgaaaactaatttagaaagtagaaaaccagctattttaaagaaaataaagtgtgtttatatatattctaaaacaatgctataagaacataagaccaagatatatacaatgttattttatatttattattaagcattaacattgaaattaaaaatattaaacatgtataccaaagtaatcaacattgtagttattactactctctctgttcatttttgtttgattgtttagaaaaaacacacatattaagaaaacatattaaatattgattataaatgtattatttttaatgttttacagttttctataactttaaaccaatgataattaactatttttttaaaaaattaccattcacctatactaaccaataaagattacatagaaaactaaaaaaattaatcttttaaaaacaaattttttttctaaacaatcaaacaaaaaggaacagagggggaatattattttaatttaatttagattaccattgtagttagtaattgatcagataatatggataggcttaggcattcgaattttctggttagtttacgtcgactaattaggagttttgggtttttgggttgggggaccaaatgaatatcttattggatcagtacgattcctatttgggttcagacctgttatcaaaatttatgtgaaacccaacgtgggaccaaaatatttttcagttcaggtttcaaatccaaagtactaggaaaaacaaatcccaaaaaagaactcaaaataatcatgtactgtatatatagtgtttcgggttttatgggtatatatttggttttggatttttttgagtatcttctcggaatttagattctaacttaactaatctgagacccaaaaaataataatttataatccgtttgggtaatatacctacctgaaaccaaatgaacgctcggatttttgggtttcttcttttatatccaagcctaaatatgtgtatgaaatataggtaattcgaatatataaaatcagtatctgaatgactaagaatcaaattcatgtttggtaatttgtatacctacatagctacatataatattttaaattttacattcttgagatttagtttttacatgatccgcttcgccaaatatgtttcctccattcgaaactaaagtctaattagtttctaaatggcaaaagtggatcgagtgagatagacaaagtggatcagacggtacaaatataaatatatgctcaaatacatatcaaacactttaggtggttgaaaaatatgatgaatagtggtaacctctcgtatatatatttgatataaatcattccaacatttagtttatttgataattttttgtaatttttgttatatttgatgaatagttgtaacgtttatcatttttagaagaaaaaagttgtgagaattattaaatgtaaatgaaaagacagaaaaatcactaaacaaagcttaaaaacactaaaactaacgctctttttttaactgtttgtttggactttggtgaaacactaaagtaccctttgttttgtattttttcactgtgaacaattttttttataataactcattgttatatataattttactaacatatgtatctatttaccattaatgtcttttcaaatctatttattaaaaaaaaaatctgcatattttatttaaccatgttaagtcttcaatgaatccaatattttacaaaaacaacaaatttcataattaaaaaaataaaataaacatacattattttatgagtgaataaacatacattatttcacacaaacgcttgtgtgaccacatgaaacacatcttgcgtctacatgcgtatcatcgtcttcatgtttctcatggatcgaaacctccttcgagccattatcattttttgatgtgtcatcattattaccatcatcttcaataattatgaccacatgatcatcatgacatttgatcgatcggacactaacaaagcttttggcttttggtttctcggaaaacaaaggatgttcaatcttgttcttaaattttgcagcggttgctagttcatgtagggattccaagattttctctgttaggtttataatatcgatgagcaaggagatcgcggtcagaagggagaccaattctagaggctcaacttctttcaagatgcctgaattaagtaagttggtgagtgatttacaggcagattttgcgttttggacatgaagatcagaagaagatggtttagtcattttctttaacgaaattgacatttctttcatcgctttgccggactccaaactcattcttctcaatggttctcctagtttctttttaatatcaactgaaacctaaagattcataaacaaagggataaatatgtgtggaatcaaataaagcgataaataagtgatacaaaaaatagataagaagtttagaggaaatctaaacgctaaacgaaagtatgtaataaaaccaacccttttaacagggtatagaggaaacatttatttaacttgattgaactcttcatttcttaaaagatttatgaagaaaaatattcttaattcagtttagggaagcaagacctgattatctgcattaagatatgaattcagggcatgaattcggtaagcacattgtcggattaattcaccgacagctaggtattgtttccaaggatgccggaatctgaattggccgtgaccaggttcccattttgcaaaattagcctatataagaaaacgacaaaaacataatgaaatgagagatttagtggtgaaataaagcaagaagggaaagaattcagagttcaccactaaccaaagattcttcattgctttttgagttgagaacacttttatagttgtcaaaatccttttttcgtttgtcaacctctttggcgccatcattttctaccacttcacaatacttgtccccaaaatctgccaatctccaacttttaatctttctttataataaaaaaacaaaatacacgactaaggaccttatatatgtaccaactttctaaaaaaatttgtttaacccgttcatttaagagatcatattcgttgcattgatgttaactttgtaaagtttttatttctaaaaatgacatccagtcagagagtttattttttaattttagtatgtggttgacaaaaaaaatacaatatttctaatcaagtggttcaatcaaattgttttgtcatgatattatttttagaaaactaaaatattgtaacatgcaattttagcatgaagactttaatgttcatccgattcgaataaaattttatttcttataaatagagagtttaacaagaaaacaaatttctctaacatattattttttgatcaagatcattctctaaaatatccattattagtcaccacacaaatatatgaaagtgtgtatgaaaacttgaaacttttcccacgtgaccaagtggcaaaactcctgctacgagttccaatctaaccttaaaagagttatactgttcaaatcagaagaaacataatgaaaggagttacctaacaagaaaaatgagagtttctcaaagttagaggctatgagtgaatgaagatcttggccggcccaaacagggcagacaaagatggagataatgacgcaacttagtcctcctatgatcactgtggaaattctcttatgggtcagctttacaacctgctcttctctgaaccccgacactgatatcaacgcaaaggtgagtatgaatatcagcagactgtaatcgtatctagccttcacccgcgggaagaacctcacaaacgtcgacaacgcagctaaaaaaacaacaaaaaaagagagtcaatcttatactagctagtgattaaacaatttaggctttgaaagggtaacttttacatatataacatgttatattgtaatatgtaaacgcaaaacaaatgtgaatgcaaacaaagaatcatgtcttagtccctatacatgcaaaacttaattggtatataaatataatttaccttgtacaaagacaaagactgcgagaagaatgggttctcctgtcggaccagacatgctggccaggtgatgagctccgattccaagtccccccgcaaatagtgttgccgccactctgttaagtcctttaccaagcgtggcccctacatatatatacccgtagtcacgcacacacaccatccaattttattataacaattattaacaaaacataaaataaaatctttaactacaacaagtgatcatgttggtattcaaacttcgtttctttgaaaatgtacgtattgcattgcatggcatgcatgcaagacctagtaattatccagaacctaaatttggtttgaccgatgtcgaggatcatgaaggataaattctaaataataataaaatgcttaaaatatatacgaagacggaccaacagagaactcgaagacgacaacaaccgtcataacagcccacattgcattaacaccgaagctgtcgtagagaggttggtaatagtagaaggaagagactaaggcaagaaccagacccactttgaacgagtgaactactctcctcgggtcttcttttgccactcttctcccttctctcacaatctctctcactttttccatatcaatcgggttgtctcaaaatatctttttaactatcagttgcagaaagagagaaattgttagaaagagagagagtcgagaaaagaggcgtttgtgtgtgggtttgtcacatgttatctagatgaccaagcttatttataagagaacgacagagaaatatatcgtggacagcttatacaatgatattaaattatgaaaatcctgccttttgtataccacttatcaaaaaatagtttccgcgtattttgtattccagaacaagagcatacaatattataaattattatttctgattaaaaaaaaaagttattatggtcagaacattttagactagttttgcatgcgataacgatgattaaaattaatttaagcaaatttacaatattatattggaaaaggaaaaaactaatatttacagaaacatattactttctttttggtcaagtgaatgaattaatggcctcctatttattttattaatctcatctcaatttatttcaatctccctaactaatccaaaattaaactggatgtaaaaactttattcttataaagcatacccttcttcatttcgaaaatttaagaacacgaaaacgaacaaaaaaatggttttgaacaccatatgaatgaatagttttaaactttcaataatttgaatttattttctatactactatcataaattcactcatgcgtgtttagttctcaaatttcatttacgccttaaattaaatttagaaattgggttcaatatatattcatttttttttatctaacgaaatagggttcaaaaatacgaaaacctgagagaggtgttcaaaacaaatactaagtgtgtgtatccaatgtgatcacataatatagataattagtttatataactcactgtgatccctaatgaaatttaatgacaaaaaaaaaaaaaatcaatagaatgttataaccatagaggcgtttgaatctgatcaacgtaacaaatatgattattacttttaaatgaaacttctaagttgtataccacaataatttatttactttactgatctatatcttgatttcgagcacaaagttaaacaaaattgtactttttaaggttagatcatgcttgttgaacttcaactcaattctaatgaaacaaattattatttctctttcgatatatttaataacatatttcattttgtccatttatgttctttgtaattgtatagttcataaaactcctgaaatattcctttatttgacgatggacgtcaaaataaaatcatgacgaactcaagtaaaacaattaaactcctatagatgtgatgagaatgacttcctcattaactttctaaaccaacacatcactgccaacacatgtcatggtcagggtacaaggtgtacatgaaagtgtttacgactctcacaaaacttaaaaaacataaaagtatatacctaaatttttattgtattatatatatatatatatatatatatgtttcaaatttccattcctataaaaaacaaaatttttggtataacataattatataaactctaaacgccctgagaaatgtaaaaagatgttcgtaaatattgtgcttaattattcctaacatagagagaggtaagtgttgtacaatcatggatggaccaaagttaccgacatcgcttagattaatttgaagcctctactttcacgttggatttggcttcactaggtctcaacttctagccaaataaggaaaagtgagtttacccttttcgatccgtacaactatcaacttagagaagtaactcatcaataagatgaaccttgatgaaatgagctttacaaactttctttacatgaaattctatgctatacaaatagaggagctcattctaggaatgatctctaccaatgaccactagaaatataaatataagggcactaatactgaaactccatatggattacgacatgtgataaggtagatgagttgtatctttgaaaaaaaagtagccacatactataattatatacttacccaacttcttatcaaatctatttggcatgtgatgatgggaaacagaaccacaagttgtcctataagaactaagaagcgcatgcccttatatcgtgctatttctatcttgtttcctattaaacctctttggttatatatcgtttatatttttcctaaatcatgattaaaacatcttattatagttttgcatgcgataacgaagattagaagatttcaactttaaaaaataaataataatcatttttaaaagcaaagaaatgattcattaacagctaaatgtcattgacactagcattgtctcatgatttgatcgttttgtacttcaattctataggaagtgggcgcaatagatgacaaggaaaatgcaagtgctgagtcaccgcactcactctctgtgttttaacaaggaatcaaactccacttagtataatatcagtttctcttccataagtcgagtcttgattagtttcactcacaaactcaatgacttttttttgaacaaactaagatttcattcgaacttaaacgggagttgtctccacacggggatgacgctactcggagccaaacaagcaaattctgtgacccacaacatggtcatgcaaatgagaaagctaaaacaacaagcacatctcaatgactaagtgataacaagctcaacaatatcacaagaacaaactcatgcacgttttatcaaaaaaaatctcgataaagctttttgagctaaatagaacaaactctcaatgaacaaagagctgaagagagttaagaacaaaggtaaagtttttatgaaagacctcttaataattcaaaaaacaaaaattttttaatgaaaggccaattctcatttgcttgaagtagttaatatgctcgctagaataatgtaacttaaacttacctcatacactagaataatatacttataatacgttttctcaaaccttttaaaaagaactaccgtgaaggataaaaaggcttaattaacattgacattcgataaaggatatagcgaaaaaggaccttgatacaatgcattaaatagtcaagatgcatgctagttgtttattacttgacgcatcaatggtttgaaaaaaccatttttgatgatgataaattgtgtgacagttaatctctatgggctttattacgttcattaatcaagactctatcggaagcaatctgaacaacggacttattaattgtccatatataagagtttagccttagcaaccaaagagatcttcaaatatgtgttcgactgatgaatccatataagctcataggtggcttctgattctatactacacctacgtacttatactgggatggctattttttaattcaagaaaccaaagaattaccaaggtagtcacaaaaaatccagaaatcgatcttctcgaatcatgcatgacctgaagcattgtgttagtagcctcatatctagtattctatcctacacgaacatgagtaggagcttgaaaaagtggcttaacctgtgaactccatagatgatatattgttgtagtacgatagagaaaacgtctaatatgctattgatatgtcgttggtgaatccaatatataattatcttgtctttgctgaaatgaacataagggtccattggaaacataacatgatttatgagcgaaaagcagtgtcttctgatagatcctgccttcaacacatagatatttccttacacgaacttgccacttatactctaaaaaataagcataagagacttaaatccttcatgttgaactctctgcgcaaaacaacaaaaagagattcaaaagagttattactagctatagctacgatataccagcaatgtagaaaaatgattcatttctttaacgaacaaggtagtatcagccaaggacggcatgaaaccataagtacgcacgacatataacttatgcagtctataaataagatgtgttggtagaaaattagaggtgtatttaaggtagattcatgcatatctcgtttttcaattaaccatgcaagaaaacattggtaacatccatttctgtcacttccgatcccatccatgaatagcatcaaatcttaacaactttacactagtcagtttggaaaatgttaaaaaacattagtgaaacacgttcaatatatatctctcaaattttgctttggcaaaaaaaatatctctcaaattttcaagtttagagacttttataatgatcaatgtggtaagaataattactagtttacttactataaaggtatgtatatagtgttttgtacaataaccaaaacaaaagctaagtaaatccatctgtagcaaatagttgttttctttgcttctgctttactatataaaagattcgctaaaagtgtttatccaacaaaaaaaaagattcgctagaagtgaaaaaacattcactctagtaagaaaagtttgctatcaatagaaacctatcatttttatattttacaaaatatgcatatgttctagttacagtatcaaagaaaaaattatctcattttctaaatttatcaaaattagctaatcatatcatattagaggataatgggatcttggctcatttcttttcctccacacaagacaaatcttgctgcataccttaataatttagatttcctatataaatttatttagttaagaaaacctatgttacctagtatacaactttaatttattttattttggtcactgatagtatacaagttctggttaatatttacaactgaaaaaggttacaccgtttatataaaagaatatatacatctgtagcctagtgggaaatcatctctagtagactgttgataaagtattattggaagcatattttaaaagtgaggaagaaaattgaagggcccaagaaaaatataatgaattttagtgaatcataatgtgctgtcgattatcccatcataatctatagagtggagagatggctaaagcaagacacaaagatgttcatgcaccttttgcagcaaagtttaggtacctcaaaagtgtaaataaagcatttttgagacaacaaacaaaaacgcagttttgagaatttgatgttggactaagtttgatccactaattagtagtatgaagaaaatgtaaatattaggaatggattaagacatccattagagattatgaattcacatgatagcacattataaggctgttaacaaaagtattataactaactattattagcttttcttctataggcctcacgtttcttaataaagagtgtgttttattgaaagtagagcttcttgtgtttttttttttaataataagctaattatatacatagagttactaatcaaagtaacataaaggtacttgtaacatgtgaagctttgttgtgtactgttaaagctgttgatggaccggttctttttaccggtcttgaaatccgtgaattgtttgaactcttactggtcgagaataattttaaacaatttaactaaattttttacaactccaaaactgaattaaaattaaaaaattccacacaaatgaaaattcgcaactaatgtacaaaacataaagttgagaaaaaaaaacacacttaaaaatcatcatctctggtttagactgactttttagttagtcatagcgagcctaaaatccttgagagcggtccgctcgtaacctctatatgaatcaagcttttaaccagcccggtttattaaaccggagcaatccggtacggtcaataatttgtgtcattacattgaacagccaccagtaaccggtaaaggcattgtagctttgataccatccaaaatagtcttagagtttcctccacatttcattgtctgctccaaaatattcactagttgcatgaatatttccatcctcgtcacgtcgcgactcgcctacaatccaatatcgacccggtttcagtttaaataagatacattctaacacaatctcatctttccaagttaaacaaccttgtgtaacttatataatatacctcaacagtgaagcgagcccaaatcttgtctactcgagtttcgatgactcccttcaagatcgttaaccctaagcttctgatccaatctgcgatttctagaaagaatcctcgttgctcgcataacatctgttacaaaaccagaaaacgttcgatcaaaaccgagatcttgagtgttttttattaagaaccttaggcagaaatgttacctcgacttggaaaatgcgaggcgggtttatatcttctacgacaattggacacaccatagactttgaccctacttcgaaagcccatgttgctcctccaccgtcctctttcataatcttataacaatacaacaaacgttagatcaagaatccatgagagacaccaaaatattattgttttatgttataccttggattccccggtttgcttcagcttatcagaatgcttggagacattttgcaagaagagcatgtgcttgattgtacgttcaaggagtgcatcaatgctacactgttaaataaaaaccacatgtactctttgttagtaataacctttcttagggattgtttaatttgccaagaacagataagtttttcacttacttttgcaccgtttggtattatttcacgcagctctttgacacgatcttggatcatttggcgatctttaggccttggtcttgggttctctcctggtttaagccttttccggttattagccggttttgcagtttcattcttgttcaccatccttggactgccctcacgcttcaagctgtgcgcttgttcaacccaagaacttatctgagacccgtagaccgatgatggccccaatggttgcccatgtttcttctcaaataactggctaccttgagggctactgtgagacggcgtggtaaccgaagaattactaactttagtcaaggtggttttgcaggactcggaagtttcgtctgagatctgctttgtggaggagcaagcacccgagaccacggcatctaacagatgatctgttcctgaaagttcataccccgaagaaccgaactcagggtccatttcttgaatgatccgaaagtcggataactctctagtgagtacttctgttctcatctgtgaaactccccaactgttgtcacaacctttgttcttatcatccaaacccaacatatcaaacaagtcgtcgcttccaagcgagcgtttcgaactgatgtcttcacatgggatttgttgctgctctgctgcatccacattagacatacaagagaagttttgattcagccacgcatctggatttgaaggtactgcaacttctccagctgttagaaatcctgttgtgctttgccatcctccttcatgttcatccacaagattacagggagattcttcaaccatttgatgatctgatgatccagtggagttgaaatgttgtttgctagtttcagctacgaaagccgaagattggaggatcttatgtccttgagaaggtattatccgagacactggcactccaataaaatcagcagcaggttcatatgttctgtagttttcagataagagagcccccggaacacatccgagctgcaggataagacccttcacgtcattcacaaaccccaagttctccataatctgaacacacaaaaaacaattcacagttaaatcaagaacaagaatctcacttcacataacaatgtaacttgaacttacaggcagagaggaaccgagctgaacaacaccgtgaggaacaaccggaaaaactgcaacagtctgaagaacaaacaaaataagcacacacaaacagttcttatgagcttgaacatatatatacactaaagaagcctaacttaggatgttcaaaacatgaagaaagtatcaaacctgaataccagcagagaattggagaagcatctcattaataacctcgggtggatgaacatcgcggttaaaactgttagctagaatccattgatgatgtccagtaaatgcagctcggccaactagaccttcacctaccaaaatgattcgattgttcaacatcattcggtttgtaagcaactgaactttctcattcccttgtgtatcaacaccaagtccacaaagtcttctaggattcgagctcgattcggtttcattgtaacattcctcccaaatcaacaagctgcacaaaaacaagtaaaaaaaacacatcaaaaaaaaaaaattagaatacacatgacaaaaatatgcaacaatcgtttaagttagaataccacaaaaagacgattacaaaagattttgggctaaacaaagacaaaacgaacaaagacaagaaataaaaattgaaatgacaagagagttaaagaacttgaactctttagacaattcataaacaaataataaggatatagttattgtcgacaaaacaactacaaatcgaaagattctttaagacaaacaagatcaaaccaaacacaaaactccaagaattaaacagagataaataattctagtcatcctcgagatctgagttttaaacccttatcaaaaaattctcaaactttaaactaacaaacactgaatatatttgactgaataaagtttgacactttattagaattaggagaataagagtggtacctagaattttgacagccaattttccagaaaacagcataagaccattgattattaacacacatagaccttaaagcttctcttagtaaaactcccatagcttttctctttctcttctctcttctttaagctccaacaagaacaaactttttcacttgcaacagtgcaatttcaaactgcccagaagaaaaaaatcgaaactttaggtctaaaaacaaaactttttaacaaatctacaacaatcaataaaaacccattattacattctttaagaggaaaatggatttgaacaaagactaacttccacggcaagatcctcttccagcttgttttgtcctaagtcctccactttgttttctttcaggatctaaactaaaagcgatcatactccgacatgccattacttccggtaataaggaagagaaaaaaaaactcaaaaccccagaaaagaaaaatacaagaaactagttaatcttcttcacaagatgctccaagcttcaagctttaagattccagtaacaccagccattgataaaacttgaagaaaattagaagaagatggagaagaaagcaaatggagattatttgtctttgttttttctctgctttaatgtttcttttctctgcttcttggtgaaaaaaagattgaaaaatgaggaaaaagtaccatcttattaaaaacaaagaacacgatgaattcgagaaagggtatcaatgtttagtagaaattacaggattgtgccactgagtggggtagtcgaagtcttttgtctttttccgatggtgctagacgaataatttattgtttttttcgtgaggtaatatcctaaaagtttgtttttagataaaaacaaaagagataaagaaaaaaagtgtaccctcggagataaattaaaagacgttcctaaatataattattaaaaatatatatgtatatatatatattaaaatatttaataacggcataagtctagaagttagaggatttgtaggattatggattgtcaataaataaaagagattttcattttctggtattgcttcccgtacacacaaataataaatacacataagttcaaggtgtttaatattgagcttatatttaaaataggcattttaaataaagttatttcaaaataggtattttccacagttgaatacaacagtgtcgatttattgcttcaatcgggacaattttgtccctgtctttttttccttctcttcttcttcatcgtcttctttcttcttcttctttatcgaacatagttgcaaaatctgattaaatcgatttcttctttgtttttcaagcaaacttaatttttctttttaattacacaatactaaaccctaagataatatatagggaacccaatcgaaaaaatttatagattttatggaactttagttctgattttgtggaatttcggttctgattttagagaatttcagttctgtccacatgactacgataggctgtgtccatggcggaaataaagaagctttctttgttgcgacttaaccttcgtaagcaaagttggaatcttttcccacccagagtcttcctataccaagaataaatcggttcacaaataacaatgagttgaaaccggtttttgaatatcgtctcacctgtctttttcaaattaccagtaatcaccacaagtccattcttgaaatgatgaaaccggtttaaatccctcacaatgatctctctctcagtgattttccatataaaaacttggattcttgaaaatccgagttgttgtctttgcaggagtggcgatttagaagatgatgcatatatcgccattgtttcaattgaatatagggaacacacacgatttattgcttcaattggtgatgcaaatatcgaatataggaaacagacacgacttattgcttcaattgggtaaaagataatgcaaatgagaggaggataaggatgacttttcacaagagaaaagtacctctttcgaaaatcatgtaaggaaataccttaaaataaatatataaccaagacaaatgcctattttctaataaactctttaatatttagattattttattatttatcatgttaaattaaattctgaaaaactcattaacactttaatttaacatcaagcaattcgtaattactaatttaaagatttaacttagttatatactgatattttagtgggtgcaaaaaggtccaaaccatattattttttaatagattattaactacttttactatgtactaagtttttttttccccataaaaacgatctataattactatgatatttttaacagaaaaactatgaacattatactgaatcactaaaagaacatcgtaatactttgaccacaataaaataaaataaagatataatttgagcattgggaggtttttagaaggcaccacaccgaatgatttcaagtaatcttgacagtttttttaaatgtaactgccagtatgttacaaaaggataatgaaagttctgcgggaagatggaccgtagatagcctcttattgtatggtttgtacaatttacaagtttaaaaagaaaaatccgactgagtgagattttgtagtgaaaaacatattatttgtgttcatgatccacgaaactaacaaaaatacaaaatagttcacatgtcatcaatcacgaacgatcaatttatcggttgtcgaccaatatatcagtccacaaaatcactgtttttcttaattgatactgattttaaaatttaatcagcatagttattaccattaaataaataaaaaatactgatagcagaattttatgtaaagttctgataaatcatatttatgaatattggtggtatatagcacataaccattggtagagacatttcatgtgatgccattctcgtccatggtcaaataaagacaaataaacaaacactcaaagttttgtaacgttgattttttttttcttaatgtgtaacgttgataccatgtgagaacacacataacatttattgaaaatttgtttcgtctatgtttcttgtggaaaaaacatttgctatataccaaatgaatatagacacatccctagtaacttagatggtacataaactataggtggtaataaagtaaatatttgtggtaggctgcaactttcgagtgaaaacataatataaaaaaatgaatttttgttttttgtttgtcaaaaaactgattttcatttgttattaacaagaaaaggtagatgagaaattgggagaaagaaaaaaaaagagatgttttaatgcttagatgtctcataaaccatcgaggtggaattagtagttgttgctgtcttgatgacgtcaccggtgacaatttgccattcactctctgaattttcacagaagtggcagtgccttttttactatcagagagacccctaaagacaatagaggcccaaactacattctcttttcaattgttttttttttctttagctcaacttcaacttaatattaatccaatagattctcttttcaattacattcgctgaatatatatatatatatatatatatttgtttaagcattcatttatagtaatttattaaaaagatctaagaaaaatgttatattgtatttaaaattatcttcatttaataaactaaggttaaagaatcttactttaaatagattgtttccatacaaatagagtttttccatatgacagttaaaatgttgtaaaatataaagtatgtggacgtaaatttttcgaagtatatggttgattcttcttcgagcaaaaactttgtgtgcgtgtggccacttaaactcttggattttgttttgatgtctaatttaagattaatttgctgaaaattcctgcaaaatatttattcatttttgaattagtcgggtttaacttgaaacttgtaggctaaaattgatgtgacttttatcttacacgtttactgttaatcttagattgatttgtggaaactcttgccagaattcacctttggattagtctgactgtgaaatttgtaagttgtatctataaaaagtgctaaaaatgtatgtgagtgttgtcttagatctgtaattgctaaatatttagaattttagaaaattataaagcaaaaagcaaaataaaaataaaaaaatcattgtaccatgtatgttcataattttccggttattgtagcgcaaatggtaaaatgtctggttctcttccgtattgccaagtattcaagataaaaatatgagtaatttaacattcgataccgatgtaataattttgggataacatagaatagagaaatgataaaatataccgacatgtataggaatgatagaatgaggatgttggagggttggagagaggaagaatgccacgtgggtagagtgggtagggtagagagggtaatagagtgcgaataatgaagaatgatgagaccctttgctttgttttcatttcaaaattcaatccttagtttctcttcttctttcattgtattttgtgtatcctactaatatgtttttttctttttttttgtatattgaatgatttattcatttcctaacatgatcttatggttttgttatcattcattcagcgtttagcatcacatttgaactgtatcctgtgttggggatcctaaccatataaacaaattaattttaagtcaaatatatcatcaaatcatgctaaaaaaaatgcacaacaaataaaatcgaaaaataagataacaacattgtcaaaattatcatttgcattgtgttgaacgaagtattatgtcgaatttatagaggattaagtgaataatactgttttgaaaacttctgtaaaatgaatatctaattgatttgcgatcttttattttcttgtcgaaaaaagtagatctaacttttttttctcgtttttcatcttcatgacatatatgtgattgcaaagtaaagaagtggtgcgcaagtcctcttctttggcgacagtgtggtgtggtgtagatgtataacaatgtggttgtgacgcaggcctaagcatattggagaagttttaactgtcgaatcatttctgatcaaagatgtcagaagtcttgttgagaagcttctcgtagttcaactatttatgataccgttatgaaccttatattcatcgatataagtattggtgggatctctgctttccgttagtcatctatatttgatcttgaccaccagcgatatatctttacgttttgtatctgttaattttttgtaagctggtggactgaatcccatatatattaagttgataaataaagcattaaatatctattgaaaaacaaaactaatcacgcatttgttaactagataccatacttaaccaattacttcgaaattgctcactgcagcacctattctcgtttttttctaggtaatgaactattaacgttttctgtttctcaattcttttcttacatctttttgtgattgatatttcaaagtatcctggtattattaatttcaacttcttcttttttttctggtcgctgccatgtcagtaattgtcccactttcctacaggatgactagtgcggaatgaggagtcagcatttcaagattctcccatggaagcctattgcctgtgtcatttgggttaaatgctagttacggaaaagaacaataatggacttcataatacaatttcaatggttcatattcatattcaaagcgaaccaaaaaaagggaatatattagtactattcatttgactaaaatccaatcttaaaacaaaattatagctaacactagtaataaactgaaaccaattgaaataggaagagctgagtcaacacaaaataaaccgaaaaccaaatagatatcataactatgattctataccaaaacattaatcatatttagatttgaaatagttgcacaaaaatttagatttgaaataactcagatacccataattacaattataaacaaggatatgtagttattttaagactgaaattaaaaacaaaaacaaaaaaacaaacaaatattttgtgcatttttggatattccaaatattttcaaaacaatttagatttttttggcattttcaagtattttgagttatttctcgaatagtttgggtgaaaaaatagccaatttttttgttttatgccggtttgtcattccaaaacttaactaaatcagaaccaaaataaatttaatctaacccgactaaaatttttgaagtaatggaatgaatcttaatttttagaactaaaatatcagaaattttaaatattatattatgtataatattattcattaacctaaattctgaatatgtattagatagggttatcacacatgtgtcataactcaaataaaatgtgattttattcctcgactagttcgatttttttctctatatatattatgttatgacaataagtgacaatgtgattcgtctaaacaagtgaacaaaattattttaccaaaaaacaaaaaaagtgaacaaaatttaatttctcctttacaaatcataattttagtccaaacaaatatgaaatatcatatgaagtttattgattgataatttgctataaaatatttgtttgttaaaagataatttgatatgtaatatatacaccaaaatgcgcagaaaaaatgctataaggagacagataatatatccaccaaagagttaataataccattataccaaacgcttgacaatattgactctatgcaaaagttaacaggcgaatgatgattctgacttagtagacatctaatgtaatgtcgcttcaagtaaataaatgttttccatcgacgacattttgtgtatatctattgcagatgacattaaatatatttatgtttattggattgggctattagaccttaaacgtggagtatagaaaggttgggccactatttgaattaatgtttattgggcaaggcccgtgaagatcagatctcacaatgcgtacatataatttgcatatactcaattataattataaacatcaattgttttatgggtgaatttaaaatgtttacttggaagaccaaaaatttaagaatctatacacgaagactttttatttaggtaagtttttccttgcaaagttaatatgacaaacgtgcccctatataaaacaaaaaacgttagcttaaatattttatgatgttagcgtataactatattgttagtacgctaaaatagcagataacgcattatcgagataataacgttagcgaaatatggatagggtttgatatatggatgaaatgatatggggtataaaccaacttaatatgttaataatatgtttgacgatataaacaaattctcaattattaaaccaatgattagatttcaaaaactgatatatatgcgaacacgataacattattattaaaaagtaacaaaatatttagcatgaagagcaaaaaaattgacttttgaccaaacaatcatgtaaaaaatacatgcatcaaaatagttagcagataacatattatcaggttaacacgataacaaaaatctcggtaatatttattaggttaacatgataacaaaatatttatatcaataagtttataattatatcatgctaaatcattttgtatcgtgataagttataagttatgtgatatatttatatttatcgtcttaattcatttattatatcatataaaaaattaacgaattgttacaacgtgaaaaatatgaattttatacaataagattattataattatgcagatttgatttcaaagattgtataattatgggaagatgataacattattattaaaaggtaacaaaatatttaacgtcaagagcaaatgtgatataggggtataaaggtattttcatgatggagagagaatgttgaacagtttttttttctgacactaaattttgcaatctttcatgtatacagattgataatacccttgttttatcctttctaaatcttctaagtagaggtattgggttcgaacgtccattggaggacatctattttccaaaaaaacaattaacctgatgtgaatcccatctctttggaagtcgttgtatcttcgggattaaacttccgaatattcaaaaaaaaaaagaaaaaatgtcaaaatctgtgaaaattataagggtatttgaatatttatctgtttcatgaaaattgatttgttttaggatttttatgtttaaaacattgatttttatattttctcaataagtagatgactactcacattttgcgtgggacatactttataagattggttgatttgatctttgaggaacttagagattatctgacaatatctcgttatcagatgacacaatcaattacctcacaatagagattccataggtcatggatcgtcattgaccagtttgataactaatgcatgaaattaaaagtaatgcaaattaaaattaaaagtaataacagggtcataatattcccattggtgatgcagtttttatagaaattttggaatgaagtagtgtttagattcactagatatcaaataaatttcgttgtgaaagagtttagggcttggaaagaatctaagtagatgtgtcaattagactatgaggttagagactatgacgaaaaaagttgagttcgggcaatgtgtcaagtagatggtcattttggaaaaaaagtttatctagagatagccacgagtctgggattgattctatcacagtcgggtgaccgtacaatattagagtaggagcaaaatactatagaaagattttacctcttcaagttttgcaaacgacaagtgattaaaaagaatcatgttcaatctcttaaaacatcatttgagtaacaataagtcaatacgcaaaaggttcttataagatgacaaagtaatgaattgtttccataatggctaactaagattagaagttgcatgataatgcagtccacacgagatggctacttttttcagacctacttctttttactttattttttacgttgctctaatggcgcttttaattagtaatttaagctttaattagctttataactcaatcttaacgttttaatgatgatctttgatcagttatgatggttttgacaaagtaaagaatacacttgtcattctctgattccaacatggctttagattaattcatgctaacccaactttttcaataccctagtggaatgtccaagtcattcccttaatatcccatcagtattttgtttcacttaccttatgatataatcaacagaatatgttttcaatgttatcgtgtccaaagttgagttttagtgctatattttgtggaccaaccacaaatatcatcaaagaaactttggttttgaaatttattctaaaggtcataagctttcagagaaaacaaaagcataaaattattctctagatcaaaattttaaatatattcaaaactcatttttattacctagctaaaaattcacttggtctatacaaagaacgtatagtttgctaagccgtttttaaaaattcgaacaaacattaaacagctgaaaaccaaacagtaaaaagaacgtatagtttgctaagctgttttcaagacgattagaaatattataaatataatctggatttagtttcggcttttaacatacagtttgtttcacttcacttttctttctttcctcatcctagttaaacttttataacacacttttttaaagttgtattgcattgtctttttcttatttgtttttacagttacttactctcgggacgaatggcgaattgacacaaatccacgaatgtaaataaatagcaatgtcgcattatacttaattgatctaaaaaggaaaaatactattatcataaagtgaaagatataaatacaacttggatctgaccgacacgatgaattctcatacacagtctcaatccaccaaactaaatagttattatcacattcaataatagaaaaaaaattgatctcaacacatatcgcgatatcaattaagatacgtctagctttatttcggtgtgtgatgggaagctttccgaggaatacaggcagataatggcatcaccaaaaaataatgtctaaatgtaatctattaataaaatccaaattttatattagtattcgaaattattttctagatacattactatgtcaaaatgtgttttaactatggatggatgcttaattcgaagagtaatgaatttccgggaattgtggaccatgtggtctattttccaatgtaccattactatcttcaaacacaagtactgacaacacaaagaaaacataagagaaaatatgatttagaaaactatatgaaaggaatagggaaattttgaagataaaggcggaaccaggcaaataaactttatttattttggctgataaatttttaaacatagatttgcattgcaatacagttaattagttgtttagttgtggaaaagaagaaaaagagtgacttgtcgcaaactaatatggttatctaaatacataaaagaagacttttgatgtgtggagtggaagtagacgtttcctcgttcttcaactatctccatggttctgctgacccacttctattatcttttcacatacatttaactatacacatatacatagattcattgtagattttaatttagtaataataatacaatatactaataataaatgttgacctactaagttattcatgtagggatcatatagatgcgttgccaaatattaaacgtgcggacatcaaatgataagacaatactaccatctgtaatatatttttctcgtcaacaaccattaattaaaatcttatttcacctatagtatacaaatggtaaaacgaatgacaatgatagaagtgtgatcgtaaaaatatatatatggtagctatacttattcttagatagattgtctcgtagatctacatttgcgaccacattgaaattttttagctaggttggatattgggtgtgaatcgtgcctaagatgcaagtgagaaatattggatatgtagcagtagcatgccgtgcatatatcatgtatgctagaattggtgattggtcaaaatccattgaacttcgaaacatcacaagaaaaatattaatcgtgagtgtcactgtttagttgtccaatgagatataaaagaaaaaagtacatatttttcccatttatgaaaagtccaatcacattttatttataaaggcgacttattggactttctagttgacagatcaatgaagcagaggatatttagatgatcatcgcaagcagagagaaagacacgtcgaagaagacaatgagaaactcacacccataatttgctgctcatcatttctaattattaaataaaaacggtaatttaattttcttgatttgtcacatctttatttcatcatcttttgcttaccttttcttcctaagctcttggatattattaatgttttagatcgatttatattataatttgatattttcttgaattgcaagttttgttgcttaattgtcagaataatggctgctttctttcttggagaatctgaaatgagagaacactcttctgatctttttatgatgactctgaatccgtttcgcgagcagacaacgaccactaatgctcatgacgatcacttctacaacttgtgctttggttcccaacaatatagacctcgagatgaagtaggtcatatagaacaaggaaattcttccatctccactttttcaaacggaggagtcttcagggctttggctccgatctacttgaaagcggctcaagaattactcaatgagattgtcaatgttggaaacggtagccacggcgcaaaacaagagcgaccggtgagtaaagagtccacgatttatggagttgaggacatcaatggtggctataagcctggcgtagctgctttgcaaatgaagaaagcaaaactcatctccatgggtgaaatggtaacttatttatacctacctatataatatgtgatacacaaataataataataagatctttgtatatacaaaccaaccatggtgatatatataatggcaataaactttctgttactttgagatcgggactcaagttcagtccatatatttggttattgcatgttaagtatttgatactttataaaggtttcaaagattggtaaattgatttgggaaatgaatttggtaaattatacacaggtggaacagagatacaagcaataccatgaccaaatgcagactataatctcatcgtttgagcaagctgcgggtttaggctcagcaaactcatacacacatatggcgttacaaacaatatcaaagcagtttcgtgctgtaaaagacatgataagtttgcaaatcaagcaaataaacaagctcttgggacaaaaggaatttgacgagcagcttaagaagttgggaaagatggcacatcaccattcaaatgcttggagaccgcagagaggtttgcccgaaaaagctgtttccgttctacgctcttggctctttgagcattttcttcatccgtaagtaacgttttcttctatctttaattcttgttacgattattgtcgatatatcagaatgatgggaccttgaagcaaagggaactaactaaggatatggaagctaggatcattacttagttttgtatagacatgcatgctaatgatttagttgtgtcttgttttggtttgtatagatatccgagggatttggataaggtaatgcttgccaaacagactggccttactaagagtcaggtaattgatttcgattatcagaagttggacatacttaagtttcttaatgttagatgtctcatacatagtacatatacaatttcatgacatcatctaacaccgactatcaagaataaataatctacaggtaaaaccgaatatatatatagattcaaacaaattttattccgatcaaaaaaatatttttagaaagatatctctttatttctatttttttttcttttcgagtctgaaaacaaaaacgtacccaagaattc

SEQ ID NO: 293 - DNA, 90341 bp, Arabidopsis thaliana
gaattccacataagtaaataagctttagatagttcttaagcgatcttttggttagaagtagataccaaagacatgaagaaactagtgaatagatcaagagaacaatgggttagtatgtgaaggcaaagaagaagaggcataatcatccaaaagactcaaagactctcaagtcacgtgacttgtatacatgatcaaacgcaaaacgcaaaactggtctatgatgactcaaagctcctaactctaggtgttcgatacaactaactccccaaatccaaataacctcgaaactggtttgaaggttttctgagtctcataatttaacctaacaagttgacaaaagagaagtatcagctatcaccacctgcatgatttggcttggtgtctggtggattgtgttttgcagcttttgttgtgtcaaggatcacgacccgcccgtcaaccaactgtgatccatataacaagacttcatgaagactaagtaacataaccagttccaagagttgacgattttagattatctcaagacaatagttccattatctaacatatcttgttctaatgctccaccaggggattcacaagtaaattatcaaatctttttcttcataacaggagaaagctataagtttgaaagatcaatactgtgaaagggtttatacgaaaatcgattcgaatggagtctttagacttatctgagatatagaatttcaagcaatgaattctcaaatggagaagggagtttatacctgggcgttgagttctaataaagctttctcggcttcttctttagatgagaatgtgacataagcaaacccttttggtctgcatctgattttgtccattataacatccactaaagcaaccaaaagttgaagaagacaatcagaatgaatgaaaatactgaaaaccttatgtacaagtgtatagactcttaactatctcaaactaactctgataaagataaagagatatgtaagtgaaggtgtacaactaaattgctgttgggattagagactgacctttgagaacttgaccatattgagaaaatgcttgggttaatgtttcttcagtgcttgagaaagatatgcctgcagcaaaaatcttcagttcagtgacagtaatacaagtcacacacagatcaaacaaagacacaaagcttttacatctaaagttcgaaacttttagattggtaagacactatgtggtagttaagcagtaaattcacacataccctattgttgtttctatcaaaataagaagaattggtacaatcacagcatacatacacaatagctatctctaaccaaattggcacagtcaaagtcacaacctttaagacctcaaaaaccaattgaggacatacccgattcaaggaattagaaatcaggaaatgggtagttagattcgtgaaagaaggattaagaatcagaaaagtcgcagataataacagaggaagagggagagagagagagagagagagacctttaacgaaaagcgtagaggagaaagatctggagaagaggagaggagtgaaggagcgataaaggaactgggtgagcatttcttttgaagccgtggctgttgccgcgatctcaccgccggcgaaatcacactctatgaactttattctcgctgttgttcttccgttccatttaccatataataaaccaaatttaagtccacgtcagcaattctaaccacactgtaaaaaaacaaaacatcatcgctccctgagagcaaaaccctaatcgtcgattctgctacattcttccggattctcagctgctgaaatctccggtgagtgttcccacactctgtcaattttggttattaaaattttgtttcatttcttttgattgatttttagtttaaaaatgtcaaattgaatgctttttctcgagaatttgagctaaattactgcaattttgtttcagttttcatgggcttctacagccatcacgtccttcctcattcttgccatcgatcaagctcttactttctcagttctcagtgtcgatagattctcttctttggtttagctgttccactctctgattttacttagcttgatccttccgaatgtgaaaatgtttctgttatgtttatctgaaatgtggactcatgaatctggaatttgagcaaacaagggtttcttccgaatgtgagcttgaatgcttacaaattttgaatctttttgtttatttgtttgctctcttcattttttaattgatctggtcacctgaaatgagttaagttcgacttatatagaagctatgttctgcaaatccacattgatgattttaccattttgttaatttggatgaagttgatccatcaagaaacactttaagacttataattgttggacttgatctgactttctttttgggtactgaccatttatgctgacaattttgtattgattcaatatcatttatggtgtcagatggttgttgtttttctatctctgattgttgttatatgggtggcttctttcttcaaaattttcttccgagctacatctatctccagagccactattcttgatgatggcaagtatttcgaagatgattaataacttcatcttttaaatgcttatccttttttttcagagtttgatatcttattattgtatttgatttcagggaagaaaaatgtgatgtttgttatcgcacatcctgatgatgagtcaatgtaagattttgagatttaatgaaatgttaagattagtactattgttcttcttcttatgttttcctgagtcatggacatgcttgacaggttcttttctccaacaataaactacttcacttccactgcctgcaatcttcacatcttatgcttctccactggtaataatatacctttctaggttgctgttttgctttccttttcaaagttgtggaattggtaaaggactgagaaatttctagtttcattgaagagaagagattgatatctacttaagttaaaccattaggttcattttccatagtaaagatgaatttgttttgtttcaggtaacgctgatggtatgggaagcattagggaccaagagctgcatcgggcatgtgcggtgctcaaggtaatcccatttgataaagaaggaatctgtgataatgattcttgtcattgtaatgaagaacatgtttttgctaatatatattgaacatgatgcaggttccgcttcaacagttaaagattctggaccatccaaatttgcaggtttagtagttctattatatctccccaacacatgtgtatctttacattcaccatctcataccgagtatattactatttactctctcgcaggatggttttgggcaattatggagccacgatttgctaacagagatcatcgaagaagaagtcactaatcactatatccacacagtatgacttaaagacacttcaggatattacttagatatatttctgcatctaattctctatgtggtggttttttcagataataacattcgataactatggtgtttggggtcattgcaatcaccgagatgtgcatcgtggagtattgtacgtctgacttctttcaatcctttaagtcataaaaccacaaaaccattcctcatcactttgttgtacatgcagaaagttcttgcagactaattcaggaagaaatgtcaaagcttgggaacttgtaagtctttctttcctttctcggaacttaagagtatctgcaagctcctattgattgtaaaatcgattcagctaaaagaatacatggttttttgtacgtccatcaggtaagccttaatatctttcgcaagtactgtggacctgtcgacatttggctgtctattttatccgccaaaagacatccgagtaaggtaatcatcataaacaagcagccttggaaaagcttcaaagcaatggcacaacatttaagccagtgggtttggtatgtctctccttcaccaaacattatatatattctttttacctttgaccatgatgaatgtgaataatgataagaactgaaacatgaatctctgcgattgtgtaggtttcggaagctttttgttttgttttcaagctatacatatgtgaatacacttgatagaatcaaccctgagtcaaacgagctcttgtagagttgttgtagctcgtaatgttggatcattgagacaagtcattgatattttactttttcatttcttgttgtcacactagtatatcacaagaaggtaagtgttcttctctctgatgagacaccatttcaacatggtttaacactaacaacatataacaatacaaacttgagaattgaaaacttgcttgctttacacttgggaaaggtcatcgaattggaatcaaagtagacaatcatcatagataacattttttttctttatggtacttttcttgtccactattatagcattaacaatcctagaacgagctttcatatttctgggtttgttctgagttgggtctaatttcgacacgacaatatcatgcttgacttgttctgtgttggaaacttgagagtctcgcaagggttagtacttagtagaattctactgaaaattttcccttttcgtcagcttttgcaaaagaagtgttctttttccctctcttattattcaacttttacaactaagtacataaacaacaaacatttgcatacatcatgtcatggatgcacaagtttatttttcattattctgataagggtaatcgcccaccattgataggaatacgaattggtatatcatatactattaatacagagcaattcatgttacattctctattccgtggctttgcctttgcgtcggttgttgccgccacagctcgtctccagtacataacagaccatagagtcaacgtcatccccaaaaatgctataagcttccatggcctgtgcgtagctaaatccatcgacaataccatctcgatactgctgctcagcaccgtcttttcttttactgcctctgctggtttcgaatcgctgcctgaaggtcctgcttcaaaatttaaaaagcctcaaaatgctttgtttcaagtatattctaggtgaacagattcaaaaaaaaaaaaaaatacttactagctccagaagatgatgtctcagcattcgaggtggatgattcctttggaccaattcgtggcttagaccattccataagatactcagcacgagaagcttccattaccgaccgctctatttccttttccgtaagctcaaggtcagagtaaaatctcccttctgctaacagcgcctggaacagagacatatacgtaagcggtaacacactcaagtcagattagtatatctaattacggatgggaacgggtaacttgcattatcaatttgatgttcttgctgagcctttatagcagctttcacctgttccttgtccacgtgtctctggattcaaaacaagaaatataatttcaaaaaaacaaagatccgctacctttcaaatttgaattatgcttgattgcatcagttgaacaaagaagagaaaaagtaaagatagcttaactatacataccccactaaggctactaaatccaagtcctgcaccaactgtcaaccgatgtggatccaccaaagaattataatgattcccgtggtggtaactcagccttatgggaggtgtatccgtgctgtagtttccttgaaatatgttgataggctctgtaagaaaaagcaatacattttgtttcataaatttcttgttacactaaagaacataaagagctttcataatgtgaatcttaatcgcacctgtgctatatgagtaaatgtggattggcctattgtacatttctgctaaagcttggatctctacgttgtttccatagacctatcacaattgtatcaaagaggtttcaaaagagattgttggaaccgaaggctaacaaagtacagccatggataagagcaaagcaccttatctcttcttttcctcttcaagtaagaggtaaaaccttcggttatgaactgagaaaagtgatccctctcttgttcctaaaccattcattgtgaaaccagtaagttctacaagttcttaccattaacactaaaaacagtaattctgtgctccgtccaaaacaaggtacatgcaaaaaatatgattatatttacaataccgaagtttaaaatgtatatcattaacgcatacaagtacatgccgttgttactctctttgttttactccacttacctttagattgatgctgtcttgaacccaaacacatagtcatatatattagccatcaaatggtaaagatttatgcttttaactattattcctttcttggtggatggttgactagaaactaagaacgcaacacacagcctaccaaacaaggtgaatagcctatccataaagtacaatcttagaaactttacttaatgtatcgttgttccaatatatctttcaagtgcaagtcagtttcctaatctagctcatgttctggtctcaaatgctaaaatttcgtcaaaacaacctagttcagaagaaacaaaagaaaaaaaattaccatgtaatccatgcacatttgtctagccaagtcatatgcctctgagtccccatatacttgatctgcaacagctcgaaaaagacaatttccatcttccaacatccgcctaatttcaaatccttttgaatatctaatctctgcttcaaactggtgttctctttcctgtgagagaggagaggaattaaataatgactaagaatccgagcagtcaaaacatttttatttcagaaaacaaacttaccaagccagagccaggatgagagggcacatagcatggcatatgctcatcagaactattatagccctcgttctcactgtgtgatcttggagaagaaggatgtgatccagttggcgaactcctactggaaacaagagagcgaggcccagcagctcttcgtgttggtccaattcgtaaagcgccaaaacttcccaaaaccgatctgttactaccaggattgacagtggaagaaggttttggtggtggagctggtacgggtggtgaatcagagttactgccaccgctaactggagaatcacaatctataccttcactttgaacatgaacattttctgcaactaccaacccttcatcatcttctctatccgcaggttcatcactgtccacagctacatctttagcatcagaacactctgctttttcaactacagtaacctcttcttgtttctcatccgtaatttcttcatctatagtaacaggaggaaccggaatattattgtttatctgtgtttctgatcccgaggaagaactagatgaggaagaaggacggctagagttggaagaactgcctgatgaacctctttgaaccaaaatccgagtcatgctgcttcttaagtctttgctgtcctaatcaaagatgaaagattagagaatatcccaaggtttgtccctagttcttgctttaggacctacgataacaatcccttgagagagggattccttccaaccgttctccacctcgcagcaaaacgttctctgcattcccctaccaatcatcaagattcccaagttttcttggaatttagatccgaaaaattccccaaaaacaaccacctttacaatctctacttaaccatacagaaccaatatcgaaacacacatgaaaactgacacaagttgcagtagtttagctcaaattctcctcttttcccgatataggaggaagctataaacatgaccaaacaacacaaaaaccaatcaaattgaccacacaacaaaaaacaacacgacaacattctctgcattccgctggcaaccatcaagaatcccaagtttttaaacaatcaaacaacaccttctgattttcttagcaaattacatccgaaacattccccaaagacaccacctttactatctctctacttgaccgttgtgaatcaatatcgaaaacttaaacagagttgcagtaatttagctcaaattcccttcttttcttcgaacccatatcggaaaaaactacaagattgaccaatcaaattgacaacacaatacaaaaacacaacaacgttctctgcattccgctagcaatcatcaagattcccaagttcttagacaatctaacaacagtttcgagtttgttgcaaattagatccaaaacattctccaaagacaacacctttactatctctacttaaccttctgatacaaaaacacaacaacgttctctgcattccgctagcaatcatcaagattcccaagttcttagacaatctaacaacactttctagtttgttgcaaattagatccaaaacattctccaaagacaacacctttactatctctacttaaccttctgatacaaaaacacaacaacgttctctgcattccgctagcaatcatcaagattcccaagttcttagacaatctaacaacactttctagtttgttgcaaattagatccaaaacattctccaaagacaacacctttactatctctacttaaccttctgatacaaaaacacaacaacgttctctgcattccgctagcaatcatcaagattcccaagttcttagacaatctaacaacactttctagtttgttgcaaattagatcggaaacatttcccaaagacaacacctttactatctctacttaaccttctgatacaaaaacacaacaacgttctctgcattccgctagcaatcatcaagatttttccaagttcttagacaatctaacaacactttctagtttctagcaaattagatccgaaacattccctaaagacaacacctttactatctctacttaaccaatatcgaaccaatatcgaaacacacatgaaaactgaaacaaagttgcagagtaatttagctcaaattcctctattttcttggaaacgataccgggaaaaaaaaagctataaacttgaccacataacacacaaaacccaaatcaatttgacatttttagcctaaaaatcaatcaaaagaaagggatcgaaatgaaataaaacgatcattaaatggcgataatcgaaaccctagaagttgaccacagtatggaaaagctcaccggagatttcagcagctgagaataccgattcgagatccgtcagagatagaacaagtttccggaagaatgtagcagaaatcgaaacaattagggtttggcgagaagaagaatgtaaaattgggagcgatgatttttttttgtttgattgaaaaaaaaattgagaggaaatgttttttttttttttaaaccgtcgttggggttggaagagacggcgaagatgctgacgtggactcagcgactatgtttcgtcagtgcgttgacacgtgttctcatcattgcggatattgtttttgtatgtgttttagattttatggattttcattttaatcgttgggttcaaaactttaaaagcccaaattcataaaatccatagttatatcattttaaactacataaatacaaaacaaatatttacatcttcgtgatatcattttgatcctctacacatctaagatattattatcatcttggttttctacaatttttaccttccttactttgagtctttgattgtatatcatcttcaaaaatatacgccaaattcgttttttggatctttttacaaagatttttttcgtcgactatcacaaactttgactctatgaaacaaattgaagaaaaatgaattccctaaaaatcttggaagaaacaaggaggctaatggtgctttaacaagtaggctagtggtgcactggtgcttttacctttgttgacatcccaccaaatttaagctcgatcaatgtgactctaattggccactaggtaacatgttaaaaataaaaagaaagttccctaaaaacttcaaactttttacttcaacaaagagaaaccaaaaaaaatctagtgttcatgagtttatcattcattttaattttaaacaccggttcttcgattcatctccaaaaaatcccttcaaaatctagaaaccctaagggggtcgtgtgcctccatttcttttctctttcattttgtgaaatccaaaacattatcgtctatcatatgtataaacaaaaatttgttgcattttttactaacaagataggttactttgcatacaatttaaagtgacgacattttgccaatcgataagtctctttctcaagagagaattaaaaatgcaaggcctgcagcctctggcagcaaaaataatacaagggtagtggaccgacaaaataataaatggggcactctataatcagaagacggccacgactcgagctggtaataagatactaattgacattgtaatgcatggcaaatgataattgcctatttaggacaagagcattaaaataattttcaattatttagagtaattacttctaaaatttaaaattttagcctcgactccaggtgtatgaaaacatggtaagtatggtcaaataataaaaaacaatactgaaaaaagaagttgttggcaatgatttaataataaaataatgtttttttaaaaaatcccaaaaaatcatatctacccgatcacatactaagtcaaatgtagttttaaatagattaggtagtctatttttagggtgtattttactgaatacttcttccgtttcacaaaaatgtcattttaatttattttattatacatattctccttcattataagagtttttaaagaaaatcacggatttaggatgctgatgtataagcattatactaataatacactaatttatatagaatattggaatcaatacactaatagtactattgaagtctatatataatgttttgtaaaaaattcttacacaaatcagtctagtaataacattttctttattatcttttggattggaacgaaaacaagtacaaaatacgatacataatctacaaataactcgcaaataaacaagtcaagaaacggtacaaagaatctgcaaacacatttttttttgagagtgtaaacaaataaaatacaaatacaaagttttattgtcccatacaaagtaaatttcctttgccccacctttacttaaggctcattaactcatatgactcattggcccatctctgccaattgtcacacgacttgatggttttctttgttttcgacgaagtgctaaaacatgtggctcaactttgggttccaaaacaaaagattttgaaaataatatatcataacacaaagaaaagaaagaaagatataaagtcagcttaaagctctcgcatggcgtctcaagattgtcatatgttattgagcttctttatatctacttttttaatcactgtcgtgacctcgcaaactcgatgccgaaatttcaagtcgatcatcagtttcggcgactcgattactgatactggaaacttactcggcctctctagtcctaacgatcttcctgagtcagcctttccgccatacggagaaaccttcttccaccatccgtctggtcgtttctccgatggccgcctcatcatcgacttcattggtattttaaacgttttaacgttttgaattggctatgttttgattaaactttgagagagtctctgtaaagcaagatcataatctttgttttagtgcaatttttttcaatttaattggattccagtttttgatttttatactgtaataattttttgttttaatatgtattaaaacctgaaaaatacgaaagcattttatttcttggtttcttttgttcacagctgaattcttagggattccacatgtgcctccgttttatggatctaaaaatggaaactttgagaaaggagttaattttgcggtgggaggagcaacagcactagaatgttctgttcttgaggagaaaggaactcattgttctcaaagcaatattagtttaggaaaccagcttaagagcttcaaagagagtttaccatatctttgtggctcctcatcaccaggtagtgaagatcaagcttttatttgtttccattgaaaataataatattttgtatttgcaatgaattgagttaagttgtaatgattttgtttgttttagattgtagagatatgattgaaaatgcatttattctcattggagaaattggagggaatgattacaacttcccattatttgatcgcaagaacattgaggaagtcaaagagctggttccccttgtgatcactactatttcttcggcgatctcggtaaacatttttcatcgatttgtatcggttgattagttagtttgtaggaaaatttaatgtgttagttgcttttgggactgaatcttgaatccaggagttggttgatatgggagcaagaacattcctagttcctggaaattttccacttggatgctctgtagcctatttgacgttatacgaaacaccaaacaaagaagaatacaatcctctaacaggatgtttgacatggctgaacgacttttcagtataccacaacgagcagcttcaagcagaactcaaaagacttaggaatctttaccctcatgtcaacatcatatatggtgactactacaatactctgttgcgccttatgcaagaaccatccaaattcggttagcatttttgttccctcattaaatatacgctgcttagtcattgagttactaaccaagctagatatgctaccagggctcatggacagacctttgcccgcttgttgcgggttaggaggaccatacaacttcacctttagtataaaatgtgggagtaaaggagttgaatattgtagtgatccttcgaagtatgtgaattgggacggcattcatatgactgaggctgcatacaaatggatatccgagggcgtactaacagggccatatgcgattcctcctttcaattggtcatgcctcgactctaagattaagaacaatgagtcattacacacacaatattctttgatgaacagctgatgcaagcttgtctaaaacattgagaggcaagaaagataatgagctattaagatgttttagtaataattaaaaaaaaagataatgagaagaacatatatgtttttaaatgtattgtattgtattatattgtttgggagaaagtggttaagtggtagttgctaaatcatgtggtatcttagttggattagaatatttcaagagttggatagagataataaaagacatattaaacaattaataggagaaaatatcaaatgctagaagaggtggaaggacaatggattaaacttttatcatttcaaatcaaatcatccaccaaatacaaaataattaagcatgcaaacaaaattctttggagccaattgagccccacctagtcaaatatataaatataatgatatataattagttagttacttagatatttaaaatcatgtgatattacatcaaataatgatatcttaacacccttactaatttaattaaaattatggccgggcagatataagtttaaaatttgttatctttgaaacgaaaattatatagggaaaaagaaaacaatatgtgaatatagaagattgatttacaacatttttccacactaaaacccgagttaccaaacacaacaaaaccaaattatacataggaaccttttaataaaaattcacacaaatgaatatcaaagcacataaaaatttaatcaagaggatcaatccaagttttcaggttgttctcttgagagcaaatgcagataggatgacgaggaacatgagaagagtcgcagcaataaaggatgccaccacggcaccgctcgttccttggcaaaagtcaccaaactgctggcaaaccggaagccagttcgagcttgaattcccgttgtgcgccaagtaaactatggctgcggaagcggatgccgccatcagggtgaggcccatcatcacctggaccaacacaaccgtacgaactagttagagggatttgtcatatgtttactcaacaaacatattcattgtaatttgtgaccaatataaggattactcgagcttaagtaaagccttgacttattttagcgtttgcgtttgtacttttttttaaagctacgaaaagtttcattgttaaaccacaaacaaaatgagaaatttcatttgtatgtttggcattgcattattataactatttattttcaaattttttttataaatgttaccgtatcacataagatcaggaatagcctaggcggcaccgcgagggggcggaggatacagactatagaaaaaggcaatgagagggttaggtagccacccacgattgagtttactatcacaaaagatctgcaaaacaaaacaataaaaaaaaatgatataagtttgaatctttatataattgaaaatcatgtaccataattaaatccctaataagcaccaagcacattgctcgaaattcatgttgatagttttttttccccccttatttaaaacgtagctcattttttctctctaactactgcttgaactttgcaactagcctggctttggttggattcaacgggttaagctacgtagcagtcttggtattatctatagtacgactatacacatttggggtttcatttccatagttggttactacattcttggcataacctatagtaagagtaacatttggagagaaacttacgacatagttggtagatcagtgtagtcagcttggaactgcaagaactgagtgaagaaaggaagagtctcttccgttgtcgccatctttgctgcagcagccatagctgtgattgctgcgatgagtctaagaacaaaatcgaagattgctacacctcttttccacccggcagggctcatcttttcttgcttgtgtttgtccatgatccggttgtagttcataggaggagcaaatacatgagcctttcctttgcctttgtctagctttggcctttgaacaatgggttcttcttcttctcttctgctccctgccttttcgatatccatggaagaaaatttagaagaagaagactagaaattagggttatctctttcggaagttgaatttggaaaagattcaaaggaggagctagagatgatgatgataatgatgaagttttgcatgtaagatatataagcataattgtaattgagttgttgaagtgaatggaatgggtttgggtgtttatatattttttcttttaggtttcatgagaagtttatttatgatctaacatttaagatcgacttgctccatttctatataaaaaacaattctacctaagtttaagtcaacaaccatgtccctttaagttataagtttataaccaaactagttcattatacaacacaaaaagaggttcttttaaagaattaatactttttgaccagtgactctgagtggaacattatactttttttgtaggattaggtcacgctgagttattcacaaacttttctttaggttgcagttaatgaattcatattaacaaaacatttccttagaatcgaatgaagatattgggaattgatttgcagaaaatgatacatgatggctttaattgttacacatcttaagagttaataactttaaaaccaaatttcacatcatcaagttactagtgcttttttttttctttttttttttaagtttccaatgacagtggcagtacctctatttttttctttaattcatttattttacaaatattgccgttttgatacatttcataaatattaaataaattgttaaaacatttatctttaaaagtgagaatggaagttatgtttttttgtcaagaggttgtagaaacaagggagcatctatttttctctcgtccctactccactcaagtatggtcagctctaacccaggatatgcttggtttatggtttactacacgctgggagtctctaatccctctaatcatggcctcgactactccacaagttgtatgatcatttattaattagagaaacaaattaatactagatatagaacataccattcatatctagagacaaggcatttccacgcccacatacttgaatcatatttttttgtggcaattcactcctagccaattgaagttgtgtgatgaatgttttatctagggtgttaagtggcttcattcgaatggaacatattgtttcttaatgcattgggatgatataccaaaagttgagtcccaagcatctcatcttggcatttcaaaacttttattagcttcagacttgcaacagctagtcaaagcactcaatggagcaccacaccctatgaagctcagaggaattcttcacgacatcctccatatctctttaacttttgctgaaattagttttggttttgtgaaacgaaagaacaacctcaaagaagatgccttatccaaggctgctttaaattcaatttcttctggaccgatttaacattaatgagaataccaaccttttgacaaaaaaaagaaaaagagtcccaaagtcttattgtttatgaattatggttcatatttctatgtaaaacaggaaaaaggattatcaaatagagttctattttagacagtggaataccttttttatcgttaaaattccacaataaggtttaagctttttgattattagaaaatgaagttttgtatttggataacatattgctaatttatttttctggatttcaagataaggttcatccctttagttttaggtgcatataacattttaaaaatgaactgaatgtcattttcatatttagatgtttaatttcattcaatcaaaataacatggaattgttttagtcatcttaaaactccagaaaaatgaccttgtaaaaactgcatggcgtagaaataaaatgccataaaaatagataaaatttctaaccacacttgtaattcgtcattaattaacctagtttagcctattagactaagttttactttggccccaaaaagtaggagactaattttccctttgaaaataacaatgttttgttatattatgagaaaagtataggataagtcaaattaaagtgagataatatgtgcattctcttccaaaaataataagtaaaattaaagtgagataatatgttcattctcttccaaaaatcaacaaaacagatatatactattattaatgtagcttccttttcaccattagtatatagcttagtgtaatgcatagaaagtacgggagcattttaaattgtcaccaaaaaagcttgaaggaccaaggcaaataaataaagacttttttttttttccctttatgtgacaattaatgataaataagtaacaaaaatattaaactgcatcggagacaactagttaagggaccttgctctaaaacttggagtaagatgaaatcataaagatacatagcctttaaatcaaaataaagatatatatggttataaatgtcaaatctttaaattttaatccataacaacaatacagccttatttgagattgaaacgtacgtaacagtcacttccagattgcaaataagtttgatattctctatacaaatatgaaaagacacttggagtgactctacaacatgcagatgacgacagtagctagatgagtgtggcagagaaagcgagctcatgaataaaatggtctatgaaactcaaaaaaatatttgaaggtgtaaacgattacgttgtatatagaacaaatgatttgaactatttttacaggttccctgcaacaaatctggaatttaagttttgtttttggttccttgaattcctcattcggcagaaataaataaaaaactttagaactgatgactaacagaaaaaatgagagtaatctaagaattgttataattttttttgttttcttcttcaatggtattgatatttgtcattaggaagagattcatagtgataacattattcatccaaggaaactgctataagattttttttatataactatgagaacaaggttaagattatttaagtttattcttaacttaaactgtgtagacataactctaggggcttggagatacacagtgtgcgagaaacaatataattataagttaaaaaagtcatcaaactgaaaaagaaggcgttttcatattcattacctaagagtgaagaacaagcaaccaaggatccagcttgttctaatcttctttatactacaaaacaaaaactaaaagctgccattaagggatcaaatcaatataacaagacaaataatttcataatcagaaacgctttaaaaccaaatctcacgacacatgtacggcattagaatagagatgttacacgagtttgaaagatgagcagaagatggacatagtaattcaagggtctcttgacacgaaccataactgcccaagccaaaagctggcctaagactaaagagtctttgaacctaccgtaaattctgtagaaaccaacattcacaacaagtttcagcaagctaatctcacaacttcgagtattatataacctcaaaaacgagtgtgtatctttagttctcagtaaatcacttacaagatgagagtcccactaatagatttcttgagattcttagtactcattctttctcttagtggtgcttcagttgctgcagatgcaacggtgaagcaaaactttaataagtatgagactgatagtggtcacgcacatccgccaccaatttatggtgccccacccagctacacaacaccaccaccaccaatttacagtcctcccatatatccaccaccaatacaaaagcctccgacttatagtcctcccatatatccaccaccaatacaaaaacctcccaccccaacttatagtcctcccatatatccaccaccaatacaaaagcccccgacaccaacttacagtcctcccatttatccaccaccaatacaaaagcctccgaccccaacttatagtcctcccatatatccaccaccaatacaaaagcctccgacaccaagttatagtcctcctgttaaaccacctccggtacaaatgcctcctacaccaacttatagtccccctataaaaccaccaccagtacataagcctccgacaccaacttacagcccccctataaaaccaccagtgcataagcctccgacaccaatttacagtcctccaatcaagccaccaccagtgcacaagcctccgacaccaatttatagtcctccgatcaaaccaccaccagtgcacaagcctccaacaccaacttatagtcccccggtcaagccaccgccagtgcataaacctccaacaccaatatatagtcctccaatcaagccaccaccagtgcacaagcctccaacaccaatttacagtccccctgttaaaccaccacctgtgcaaacgcctccaacaccaatatacagtcctcctgtaaagccaccaccagtgcataagcctccaacaccgacttacagccctccagtaaaatcacctcccgttcagaagcctcctacccctacttatagtcctccgattaagccaccaccagtgcaaaagcctccaacaccaacttatagtccaccaattaaaccgccaccagtgaagcctccaactccaatatacagtccacctgtgaagccaccaccagtacataagcctcctacaccaatttatagcccacctgtcaagccaccaccagtgcataagcctccaacaccaatttacagccctccagtaaaaccacctcccattcagaagcctcctacccctacttatagtcctccgattaagccaccaccacttcaaaagcctccaacaccaacttatagtccaccaattaaactgccaccagtgaagcctccaactccaatatacagtccacctgtgaagccaccaccagtacataagcctcctacaccaatttatagtccacctgtcaagccaccaccagtgcataagcctccaacaccaacttatagtccaccaattaaacccccaccagtgaagcccccaacacccacatacagtccacctgttcagccaccaccagtgcaaaaaccgccaacaccgacttatagtccacctgtcaagccaccgccaatacaaaaaccaccgacgccgacttacagtccacctattaaaccaccaccagtgaagcctccgacaccaacatatagtcctccaatcaagccaccaccagttcataagcctccgacaccaacttacagtccacctatcaagccacctccaattcataaacctccgacaccaacttacagtccacctatcaagccaccaccagtgcataagcctccgacaccaacttacagtccacctatcaagccaccaccagtgcataagcctccgacaccaacttacagtccacctatcaagccaccaccagtgcataagcctccgacaccaacttacagtccacctatcaagccaccaccagtgcataagcctccgacaccaacatacagtcctcctatcaagccaccaccagttcataagcctccgacaccaacatacagtccacctatcaagccaccaccagtgcaaaagcctcctaccccaacttatagccctccagtaaagccaccaccagtacaattgcctccaaccccaacttatagccctcccgtaaaaccaccaccagtacaagtgcctccaaccccaacttatagccctcccgtaaaaccaccaccagtacaagtacctccaacaccaacttatagccctcccataaaaccaccaccggtacaagtgcctccaacaccaactactccatcacctccccaaggtggatacggtactcctcctccatatgcatatctatcgcatcctatagacataaggaactaggtaaacaagatacagtacatatatttcctcaaggatcgccaaataggctttctagcacaagagagatgtatgttaaagctacatatggtactgcatattatgtggtaaaataaataaagttctataaatggttgttcacataaatgttacagtcgatctcgttgttaaaatcttgaaattgtatgccatacttttgagttcaagtgtttttctgtatgcattttcgaaaatctaacaaggaaaatacatttggcaataaaatcaacatcaagtaaactatctcgataccttttgtattaaagttaaaacttgataaatttcattagcatatattggcagatcaaaatatttaactgctctgatatacaaatctaactaaacaattataaaataaattagagacaacatcgatgatctaccaatcactaaactcctctcagaaatgagaattaaaagcatagtcataataatagaatatatgtaattgtgtggattatttgaagagcagaaccacccactcctttttcctgcattgaagattaatgaatgatacagtctgaacaatatgttatgtcagtggacacaaaataaaaagtaatactgatattttaaaaaaaactataatactatgcgatatttccatggaggtaaatctcatgggtatcaatactaaggtggagatttgttagaatccatgttgattttcagataagtcgaacaaagaatagctcgaccagaagctaagctcactcttaagttttgacaagcttcgcgtagagccagaggttttgttagagtaaacaataacagatttcatattaaaattatgcttcataaatgggtcacaacataaaccatcttcagacactaagttcacacacaaacttcagttcaagcatgaacttgaaaagaacagctaagatagttacatgtcctctacacatatataatttgaatatattacataaaacacacaaaacaaggattaaaacggtgcgtatcatgggataccgatgatgggcaagaaaggaacgtaataactggtcggagccagcccccactcgggaggaactggtaaatcaacggtcttggacgaactaaaagatccgaagcttcttggacatgatttcaagaagaacaacttggaagagagaccatatttgtcaccgccaagcttaacaatcttcgacttaacgttattcttggaagcataaagttgcttgacgctgccttggagttctgcttcacagtttgattcgatctttgagggaagttccgatatgaagtcacccttcttgtcagttgttacagtgaaccgcgtgtttgtgtggctacagctaactccgaccgtgattcctatatgtatcacaaagatataaagcctattcacaagtgtttgagtatataagtgtctactataacaatgtctagtcaaaagagtttacattaaagttacctgaataatcataatcattgggacagtcgaaacaagagactttcccttccacgagcgaagccgagactacgaggcaagatgagagagttgctgagaaaaggaacacagctagaaaatgtgacctcaaagccattggaaaaaagcacagatcacttgaggaatacatagtgaagaagatgtgttattatataagtaaatagagatatttcaacgatacaaggacagtcacaagttttacaattgcttcattactgaatgggtcccaaagaacgagcatggtggttgagtttgcgttaaatgaatgtgtatccaaaatcttatcaccatgcatgacattaattaaacttttcgatagatgggaatttatgtgggatttcttctagtcaattaggtgagaactatttgacgtaatagtttttgttggtgttaattaacttgttgatagtatagtagtacatatgggatccaaataatcagttggccagcgatgttatggtttgatctgtaaacataagttttccaaaagtgcaaatttaactttatgtaaataaataaataattcattcagtagtgtatgagatgttaggatttagcctaatgataaatttgatgtgcgcgcgacttggaaggaaaacaaaattatttcatgctctaaaaaataatctagaatcacttatccgaagtataactgcgttgaattacgtcctgcaacatgaagatcattgagcaagtaaactttcatacaaactatctccagagtagctcaaagataggacacgatcgtgaactattttttagagggaccaaaacagcatgttgatggcttgcttctggtgttgtgtcgacgagtgtcgactatttgtattttgcaatgttttctataattggtttaaaatttttaaactaaatatttttaatttatggtttttgttagtttaaaaatcttttattttaaaacagaggagtaatttacataggaaaaaaaaaaatcaaactgagagtaaatatttgtcaaaataattttttaaaaaaaaacaaagagtgaggagtatgcaaaatagtcaacatgattttatgaggggcattaaattgttgggttcgttccaccgtactattactctgttatcatgcatttgtcatttcaccgtcggtagctctccttatggctatatctcttacattgctgaggactgtggaccaaaaaatttgcaaaatatctgaattcactgtgagtgtttaaaccaaagtattacggttgtaaaacaaaaaaattgggattaagtagttctgatatttaaatgctaagagatgaccaaataaatgcagatgattttttttaaaaactttaagtaggaccggtccacactacctgttttgttaagaatatgaatttcacaattcctactcatttagtcaagccttcttgctttccttctctgattctctttaagagggatggctcatttggtttaagatccatattaaactttttcaagtactcaactgactctctttatcttcgtatgtccctatcattcaaaaagaaagagatgtatgtctcgttcactcctaaaaatatacctaagaaatcaaagatcccgagcaagggaagagttagtaacaaaagaaaaaaataaatgaaaaaagcaatagtttcaactggaatctaaagtgtaattggaatcattaaattgagtgtccggaaacggtatttaaaacttaatagctcaagttttcaactcgagttggtattagctacacgtgtatggtttgaatgtttttgtagtattattggggttaaatccacaaagagcgaattattgcaacactagacttctgagatccaaactaatatagagcaaatggtgtcaggggttttaaaaattcaaagtaaggagagcaattaaaaggcaagaatatagcaataagaaaagtaaatagtaaaaaagcaataggcaaaacaagatttaagcaattaaaaatatcatgagaccaatggcttggctcagacaaacatcatataacaatactgtggagatgtatctaatcaaggcccatgcagtcactttcttggaagtggtcttctgtcttaggtgggctacggtctggatctgtcatccatttggctaatgtctatcgcaggagagatctttggaccggtgggaagggaagctgtagtggtcatggttctcccgaaaatggttggccaatgccaaatttgtttgatgcttattaagttctggatcaatcactagcttttcttagctgaatatttgttttattatatgttcaatcttgaaatgcgatctaatgatcactatgtcttgtattgaccaatcacattttggttttggtttaactcgccatttttgcaccatcttaaattgtatatggctccatgattattctactttttgaatatataaatccaaattgtctacttaatttatgttagcatgttctgtatagagacaatttttctgattaaaagaaaatcacataactatgatgaaatgcatgccgtacgtgaaaacataagggttatatttatatcatcgaatattttgattaattttatatatactattcaaacccaattgtatttattttggtctaaaattccgttttgacgtggactaatagaattccgtgcgtaaatcaatagtggttttgcaataaaaaattttgaatgactatttttttaataaaagaaacttgatcgtcatgttgttaataatcatcatattataaagatgagttgacaagttactccattattaaagtatatgcatatgttcctggtcactatgatattgtgtaactaaaacttaatttgacccgcacaaaaatttgcttttactagtttcgggaggataaattaggaattggtctactctcaccttaagatctttgaaaccgttcttttctaatcaaaaatttaaatctaagacgacaaaacataaatggaatcttatgtaaaaataacaaatcaaattatagacgcaagagaaaaaaaaaaagtcaagttttatcctaattagtaaagttcaatcaaagcaaggaagcttcagcttttgaaagtcgcattagaaatattcaacgcaagagtaaagttataaaatgatttgattaatcacacgcggttacttagaatcgtttaaataaagttgtggcttgatgtttaaggtgtaaggttttgtatatacaaaatggaaatccaaatgcgtagcataatgtttcatctatttctatcccttctgattcatacgcaaatccaagccgttggttcacttgatcaagcttctgtgtcatctattgatgtaaaacgtcatcatttaacggtagaaacgatgccgttttcgggtgattttgtgcgtaggcagcttgccggtggaggtggttcttcaggtggaggagggggaggcggaggctctcgaggtggttcttcaggtggaggaagcagtggtggaggaagtcgtggaagtggaggcggtggaaaaagtggaggaggaagctcaaaccgtggtggcagcggtggctctggaggaaataaggctggaaaaggtggtggcagtcgtggtggcgatgatggtgacggtggtggagatggtggtggtgatagcggaagtagtggaaacactagaggtggaggacaacaagttcccgtagttccaggcggcagatttccaagcgatggtgtccgaattgaatattctttagtgttgttcatcttcatgacatgtttagttatgggatcatgttttctttagactccaaattttaatttgtaacctatttctctctctctctctttttagtttgttgaattattttgtttaatacaattattgctgatcggttttggttaataataatacgaacgtagctcaaagattcgctagttgtagtaatacattccttggggtgcatccacgtctctcttgatcctcatgaaaccattttctccccaagaattcttcaccatccaatacttagttccttcttcactcatttcataaccaacaattgtaaccgcatgatgcaaaatccgtctcacattctccgttgaatatccctcccgagtagtgcctaaacgcagctcctgtcccctctatccccatggaaacaggatgttgagacaccgcttgtaccaacgcttcctcattattcatttgccatgaattttgaaatatagttcaaaaaggcctacttggaattatcatattttttccccttactctatttgtcaacgcttgagtctaacttattggataaccagtacagttgtaaactttaaatatgcaaagctatgtatgattcatgagaagctttcgaatgtatatagaaaaatttgaatcattgagtggaatgtgaatacagaagtaatgtaaaaattatatcatttatattgaaattgtaaacaatttgatttcagctttggtacacaaaagcaaataaaattacaaaattgaaatcaaattaattacaatgtgaaagatgcatgtaattagctgacttgcttcatgtagacttcacaacaccttgtaaaagagactacacaacacccattacaagccttgcaaaataagaataccaacatccattttttattttgcatatactgaaatatgttttggttacacggaaacaattttaaagaaaataattgtatcatcaactgttcattaagtagaaaataacatttaatgtgaacatattcaaggataacttttgcatatcctagaatatatccaatgctttttctagtttcgccattactacaaatatcattcacgatatcttccatttctctacgctatgttggacttagaataatttcctaagatccaatcaaacgctatgttagacttaaaataattttctaagatcttatcgaacgctatgttggacttaggatgaatgactcattcgcttgtagagaaaaatcacaacaaaacaatatttctcctcttgaaaatatatctccgtattccaatgaataccaaaaacagagagggcgacgggaggggaagggacgaaactcctacatggctggtgacaaatagacagggatatcgaacctaacatctcacaaactcgatctcaatctagctatagacgctaatcaagagaagtaaaagaaagtacctttctatcagacaagaccatgactcgatctaaaggcggaacctgatctaagaacctatctcaacttttgagttaagatgagattgtacttgcagagcttgacggcgctcatgtttactctttttggtatatgacgtcaggcttagccgcttaggggtttaggtttatgtggtgtataaagagtgacttggtttatatagtcccatcgttttccttatttgaccttttttattaaagagtacaaagcctttttgggtcaaattgatgatatgtatagagccgtggctagaaaatccccaaagtacccccacaaatcactatgtcaaagattccaacgagattattcccaataccataatcatgagaaaaacttaagtttcatcaccaagcgaatacattcctttataatctgaatggttaaaattgtttcttactacctgttggttgagtacatttgttggaccaaatattgtcaagtctcttcaaggcattgtaagagtaagcaccaccagcttctccacccaactgaaatcttctccattatcttcttcatatcgaaataattaaactcatactcagctaaaaacatctcatcttgaagttcaacaacgtcttaaggctctcaagattcaacaactagatagagaaaaaaaaaggtatgaagttactctcacccacacttacaatcattttggtttcgaaatcgacaaccttttaaatttcgcatatcttcttgttaagttctttatttcttcaattttgggatgatttttcacttttccaattgaaatagcaaacgggcgttactcacttcgtgaattgtgagtgtatgtaactatgtgtctttgattcatgtaagctattgcaagaggttagaatgattaagccttacgctttacaagaattcacttttacacactagactttagaaaattcactttctttctctgtttcaggagttaagaggacttttaacatcacaattgttgaaatgagaacagtatgttcaaatatacaaggaaaatcaaagaaagctaactagagttaaaagtatattaatctctggttgagttatgcttttgggaccacaaggaggagccttgtgcatcgctggccaagaaggacgctttgtccatttgtgattgcaaaaggagcgtttggtagaagcattaggtctaaggagtgtcttgctataagaactcttgaagacacacaaggtaggatgtcgcaagccaagcggccgaaagagagagcttaagaaaacaatgtagatctatggagggagaaacaagggggttttagaaacaagaaagtgtaagctttgggtagtttcttaagtagtcaaatgatgagagacaatgaatcttagctagtgaagagctttagacaatcacttgtatcatttgtaaacaccttcttcttcatagtggagttggggatttgttgatcccgaccggatgtagtggctcgttaacgccatgaaccgggttaacaaatcacttgtgtgctcttctttcttctctttctctgttctgtttcgacttcttctttgctctgtttttgctgtgatcttgcgttgatgtttattgcattgcttttaagcttgaggtgttgtagaggtgtcgaaacttcaacaacaatgtttcgatatgtgttttcaaaagttcattgtggatcttaggtttcacaagattggatagaagcagccatgacaagtcacaagtctgataatgaccacatcattcccaggttctgtcactacatgtaagaagacaaataacctgtctgttcagagagcctttagggtgacttgtatgcagacagagaaaccgttggaggagttatacaatgttaaagtggaaaggaaagtttcaaagaaacggttgtaagctgatcttttctttaacgctccttatattgtttcaaggcctatggtgatgattgatccaacttagacttttgagtttagagagccaagaaactttacacttgttgcgtgttgttgtagcctgatggatcttcttgtgataatataagaaaacaagttctcgtttgttctgcataagtaaacttaggcagcttcaggcatatttcagagagagataaaaaaacaaactctcaaaggataactaaaagaactttcaaattattcaactagaaagttaagctttaagaaatctaaattcaaaacatcatatcatcaactgaacaaaaagagaaaccccactatttggacaaaaccccactgtttcatcaactgaacaaaaaagaaagaaaaccaagcctgaattgcctgaaaactaaatcctttttacttgtggcttaagaaataagcagagttatgattaggaagaactagagctgctctctcctgaacagccttggccggagttgctagaatatcttgccggaggaatgggtaatggtacctgaccagattcaccggaagtagaagcgccatcaccgccaggaagagagtttccacggccagagtttttaggggtgagagcaaaacagagtttgcctgttccagatcggaaagaccagagaggatagacgtcgtcttccttaaacaacgtcttacaagcatcaagcacgtttttccaacctttaacaaagacataaatccagtttcctttcattttccacttcctcaattcaagcacatgcttattcagctcaggatccacgaaattcacaggcacaccattgtcacgaatcttcatggcattctcatgtatgattcttgtctcgtcctctgtcaaaaagtccggagttttcacctgcttaaaaggaactgagagacgtgcttcagtttttttgagatcggtcttatacagttgcctcgttgagatcaacttcggattgtaaccgttctcttctctcctcatgacgttcaagagccactccggtggagttgtttgaatgggttcctcctctaaaggacaaatgattttgcgtttcttgtgacttctcttttccacattaatgggacgtttttctttggaccgacgagtaacataagaagaaggagacggttctaaacctcgattagggttttgtgtagtactggttccacggaagtgattgatctttgttgttcgagcgcacgcgtacatgttgttgtcttcgtgggagaagaagatgatcggtgacaaggacctctcttctttattggcactgcatccccagagatattaggatcaacagtttggtgttttccaggactcgtcgtttgagattctgtgtggttggcatacatgttctctaccctctgtccgacaatttctagcaacgtatcctctgaaatacgactcatcagtgaaacaataagatcatcatgtttcaccatctttttgtttcgattaaaaccaggtttcgccattatgatcaaatctcttgacaaaatagaaccccaaaaaaacctagaaggaattcgagttctagttagagagaaaaagggttgctttgcacgcaaggaacaaaagccaagagcgagagagaagatagggtaatcgggtttgtgtaatgatgatcttatataataattcaggtaccttggtaattaagagagagagagagaaaggcaccgcctctttacgagattaagaaaacagagaaaacctaattaaggccggttctcagatttagaccggttttaataagattcaggtcctacgcttattaatatgtcatgtctcatttttaatcacttggttcacctgaacatgttacaccaacttaattaatatatgctttcatttgtgaaaaatgtaaattgactaaagtcctctgttttcttttgtgcttacgttttttttttttttttttttctggtttcaagcaatttaaacttttacttggtgcttttattcttctacccacatcagattaaaaatatatatcaatccatttgcacgaaaacatggggaccataatgtttctcaaaataacattttgatcagaatactttcaactacttcaagcccacccaatcaatcttcatgtattcaagcaagtggatagaaagcaagaatggccaaaccacacattccttggggtgcatccacgtctctcttgatcctcatgtaaccattttctccccaagtttccccccaagaattcttcaccacccaatacttagtcccttcttcactcattccataaccaacaattgtaaccgcatgatgcaaatccgtcccacattctccgttgaatacccctcccgagtagtgcctaaacgcggcccctgtcccttctatccccacagaaacaggctgttgagacactgcttgtagcaacgcttcctcattattcattggaacggtctcatatccgctgattgtggctgcacgaaaagacgatgatagggtagttgatgaactacaagtttgttgtgattcttggtatggatagttatcctcagtagtgatgccttggtttttgattatgtactcgaaagctttcgacattatccctccacgacatccttgattgtagtctctgtcgcagtctaagagttgttgctccgatagcgatacaagctcgcctttagtaatctttgtaatgccttccactgccgccaccgcggaaaacgcccagcatcctcctattccgttttcaaaaaattcatgtttaaaacaatgtatctctctattcttttgttttttgttaaggaacaaaaattaaaatccaaaaaaaaagaatcaacatagtgacgtcaagcccaaataatgcagattgttataaaaaacaaagcttaaataattaccacatcggccttgatacttaacgggtgtaacagccccctcttgtctccaatccatgctctcgccattatcactaacattaccatatctaaacggcaccgtgtttttgcccgaagacagagttgaaattctggttatagcctcgggcacaactagtccagtgtgtgtcgcccgaaattcttcgtccgtaagatcagagaactcgttgatatcaaccttgtacgtgattttattattcatgttgaagttctggacgaactccaaattcttcttgaagatattaaaccgatttcttttctcggtttcgtcagagtaaacgcgattgaatcgagccatccattgctcatgtttctcaatggcagaagcttcaaaaaggctaccacgagatgtagctagcgaagttctgtaacttaaaaaaatagttagaatgaagatgatagttgacgccattccctataggtaatatgtatgggcacaatttaaaaatagtatcaataaaaatactcttataatacaaatgttttggtttttgttacttggtttgccaagaagcgggtatgccaaaatggtcttatataagaaattgtgagtgaagtgtgtggtgcgatgttgagtgtgtggtttaaatatactaaggaagtgggaccaaatgacatgggaaaaaacaaattgcaacattattgatgttagattctatttgccagtttttatatgcttcagccttcactcaaagttaatggtcaagttttaactcggtgagaattcgtttgtattggctggttaaagtttgggaggttcgcatgatataccgttttgaaaactaagcttatggtacaaagccattcttgattttttttttttttgctttggttttgtggtctatatttatctctctacctgtgccttgctcgaacattgtacacgtcacacgttgtactcttagtgcattcgcagaccacacgagccaaggcagcaattgttaaaatataaaatcaggtagaagcaaaggaaatcacaaatattaaaaagcgaatatgtattggttccaaacaaataaatgtattttaaattatctaaatacgctggtctcacaaatcttatctccctaaatagtcgagatgagtgtgtgagtgtccacgaataattcatattatacgatcttcgaatagaaccaaaacaatcggaaataatacagagattggtatcaaattctagcaaataattggacgagtaatttttgtttactttttgtgttctttttattcatttttttcgtttctgcgtcaacgaggctttctttttagtatttgaccaagttggtctattctattttattagtattccgttataccatgccttcgacaacgtgaacaagcaaacaacaatatttcgtaatcgaatcaatataaattgtgaaattgaattttttcatagaaaataatttaaaaatccatttttgcttttgctgttgtgtctggtcaaatcctatcatgtaactccataatgcaataactgattttttcaagtggctctactctcttacaattacaacttgcaaagttattgttatgtagataatgttattgctgtaaatggttgaagtaactccctaaggcaagtggcccttgtctcgaatctcggcattaaggctttaaattcttttgattgatttttaagtttttgctttgttaattttggctgtttcacaaatagcgcaaaagaaaaaaaaagcaaaagaaaaaattctacccattcccaccaaaatttagccaatcagaataataatagctgaaaatatttttcaactcatttactcttaaaatagggaaaaagtcaaaaacaataaaacgaaacgtttcacctacttttaaaacatgagaaaaaatttcgcgctaactttacttttttacttgtcaactttttttaactctatatatctacacaccaatcacaaccttcatgttctactatttcacgtatcattgggaattatgatttgtgtttttttcatttttccccgtcatggctgatggctgaaaccaaaatgtactttaaaatcaattttcttagttttcaaggtttagtgtacctgaagtctaaagataaagcttccagtgtgatacatactccccattcatggtttgtaatctaatcatttagcttgaattgaaagtccctattaaaatgctcaagtccctcctagggggacttgaaccgtttcttgaccttgtatgttgaaaattcttcacgtcaagcattaatctttactcctttattcttgggtttgcctttcaaaagcaatgttgcttacaagtaacaaaaacgcttttatcatggactttatatctaaatgttgccatttacatggctagcaaatgcttagcatgttgtcaaactcctccaataaaagttgtgtagtctatcatgaacatggagtcttcaacggtgtataatcaaattgtagtcgtctaatagaccgtttcaactaaccttccgaattcgacacttttatgaataagattattaacctcagaaaaacgattatgttcttagataaaaacatttacttgtcatgctctttgtgtttcacatctccaactcgttctctaacaattctaaatgaaaatggtgatttctttcaagtcaaaagaaaaccaagattggatcatggatctacaaataagattgatccaaattcaagtttaattggagtaaatccatattaaagtagcgaactcttaaaaagtttcatgttttggcaattgcacttcgaagtatttctgtgttcagagcaagacactcactaatcactttatatggcaatgtcataacacaaaacaaagatcaataagtcaaacttttagagcttgtgctgatgatcaaagacttaagcctacaactttcactctccatatccaaattccctcgtcgagttatcatctccatgttcttgtataaactctgtttcaccagattcttcatcatcttcctaccttcttcccctgacctcgggctcattggagatcccatcccaggactcacccaacccgtttgtggacccgaatgaggacccatccgtacatttctctcatccttgaaccattgcaaaagtttcactgccctcttttgaaccagaggactcccaagtaagctcacttcaagaagaaccggcacaatccctgccttggccattttctcacgctggctccaactctgatgagctaataccatcaagatatacgccgcgtattcttggcatttcggtatatcttcccatgttagaatctctattaaacctttagacacaagcaaacaatcctccattgcttttttacccatttgagtcaccaccaatttccctagactcgctagtgccttctcagacaagtctttagttgacattaggcttaggagtgtctccactgccccgttcaagaccaaaggtcctgcgttttccaacacaaggcagagattgcttatggtggctagacatatctctttggtcttcatatctgttgaatctgaattcatcgtgtccattaagaacggtagaatttgtgatgaagctactggtaattgtgtgttggttagagatgacaatgaaagcagaagctcggcaaaggcatgtcttgttgattggtcgagaacttcaacatttttgggaagctttgagcatatatcggcgttcaccatcagcgccttgttcctgaagtaagagaaaaataagaatcaaattcgttatatcgaataatattaacatttcatatataaagtaattttacattatacaatattatagtatatttaatatcaactatttatgaacaaataaacattgaaatgtttctctttaaaataataataaaaaaagttaagattaagtaattcgaattttccaataaatattatgagaattccaaatttctttttatcaatattcgctgatgcaatctctttaagagaagtgtgaaaatcacttgtgaagcaagaagagataaagtttttaaaaagcttaagtaacattgattaattcataaaagtgtttcctaagaaccacgttttaatcaatttcaaaatcaactaacgatatgtttcaacttcttgctaatatatgtagtttttgatatatatctcgtatttgctagaaagagtattataattatgtataaaaaaattaagttagacacatatagattaggcagaagtcagtggaatatgatcttcaacttttctaatagatgaatggtcagaaaatattaatggccaattagagatatactaatgggctgtcaactaacgtgacttgtctctacccttccaagttcccactcggaattaatattcttaattttcatttagtagtaaaaacattcattattagactataatgtcacagttatttgtttgtttattattaagaaatgaatgatatatcgcaatactgaccaatagatattcatccatttcttagtggaatgccaccgaagctttccaaactcctctatgtctatgttctttgtatttttcggaagttatagacacatgtatatcatttgcatataaattctaaactctttttttttgggttttaaacacctgtcatatatttatttttatttgttttatattctacatcgtaattaccaaagttcttaatgaattttcaagtgattaaagaattagttgtaaataaattttaacaaataatcacatatttaaagtttacataatatgatacacatatgaacaattctaacttaattattatacctataggtttataaggtgataatgttgcctttatgtaacactcaatattgaccaaatttaaatcagtgagggaaagaagggcacgtgagggaaacgtcaagggtacttcataaaggcaaattagatgctacggcaggatccactattttagttataattatttatcgcattagtttcaaaatcaaacactcttaaaaagagaaaaacaaaatgaatatcggttgacgaaaagaaattgaagagtatggtgaatgaagaaaattaggcatatcatcacctttagtcaaaagaatgaaaatcggtaaaaaatcactctagtggataattttgtcaacagatgacttatgatcttatgttatatattcaaaaattccaatatatgttttgcaactatatttcacactaatttaaatattctaaagtcaaagataaatgaaacaaaaagacagatgatatatctattatacacctaagttgtaagttgtaaacactatttttgaacatcttggaaaattcgaatgtagccaaagacataaatccaatatatttttttggtataaccgtaaatccaataagatcaatcacctttggataaagctaaaaatgcaagttgatttaaaaatcaatctaatctaaatgattgtaaagcaagagacaagactgtaatttgacaattaccatacacaccaagaacaaaaccaaagactaaacaagaacatataacaaatatttaacattttcttcattgttttctcgtaaattagacaaaaaataataataaatacacatgcatcgatatttatgaattttgatttatcagtgaaataatttgataaaattactaaaatttataattgaaaaattaaaagaacttacgtgtaggttccatgagaaagctgaataagagcattgacggcagctttctgatggccggaaacatcggaagcgaccatagaaacaagaatttgaataacacctagctcagccatgagcttccgagtcttcttatcttctcgggcaagtttctcgatctctatggcagctttctccttctcttcccagcttccgaagtggatcttctttacagttttttgtaacacaacctcctcattctcatcttctggtggctttgatacaatttcttccggaagcgccgccaccttctcgaaatcttgataggttcttgatttctctggtaacgcttgaagattacttttgcggaaggatgctttggatttcaaaaggcatcgaatctttgtgaagaagttgagcttcatgtattgaagttgccaaactgaagaagaagaggattgtgttcgagaggaagacataatggatagatgatttgatgttctgtttcttttagtggacttcgctcgtcatatatatatcgacctattgatatttgtccaactttaggtatttatggggccaataaggtataggcctaatgccggtaagatttttagaaaaatataattttaaagtaaacaaatgatgtacgttttgtatcgcataactaataatcttttactatatacttcatgtgtcctaaaactcaggcaaggcctaagcttctttatcttttcattttttcaatcaccaccataaaaagcatttggttatatagatccactacttaataaaaatggtgtttcgacgaaaaaaaaaaatgtagatccaatccgtcgataattcaatttataaccattttaccaacatcctaaatttcgttggtatactatattatccatcgtagataatttcaaaactatttaccaatgtcactttgccggtaatagatgttggtaatacgtcaaaatatgtttggatgtactattgctaacatttaaatgtaacgtcaatagtcgttgcatgccacatatttgctaatcctagttccatcggtaactcgttactaaatatcagttgtatactgtctagaattggatatcagtacaatccaacagattagcgacgaatattttttctatcaatatgatgtcgagaaattaccaacggatgatcttttcaggaaatatgtcggtaatttccctatttacatatatatagtgaatgtatgatgtagcattctattgaatgattctaagtccgcctaacatccacaaagcatagtatatgatatgactcaagaaaatgctgaaatggtttgcatatttttatgtgaattgtttttttccctatttactaaatctctttttgtttatgtatttcatgtagtataaatataattatgtatattatttgattatggaaaatttattgacagtcgattatgtgtcgactatacatgttatagatgcacgacgtttgatcatcgtctgactaacacatctatatcactttaaaatgttgtaaagaattttagttttcaacaaaagattccaataaaatgaataaaaataaacacctttcatcggccctcgtggtcatttgaaaagaaactacaagagtttagatccagctatatatataatgggtttaaacaatgaattctgatcttaaaatagttatcgatttaattaggattaagttaagtaaagaaggaataatatggaggagaagaaggggacaagcgaggaggcaagctaatgcacatgcaagagaacagttttgtctcttctaaatctcaccataaggttacagcagagagatcattgaaacactaaaactaatactctcttttaaattctcttgtttcattaattaacacgttcgtgtgtgtcagttccaacttaacctcggtacgaccaaagatggccacatttcttgtttagaaaaccacatcaattaaaagtgtttaggaaattggcaaagatgaccattgaaatgatttttgccacgattaatttccattttttagttgcaatttggtttatgaaattatattgttaattttttatttttttgatcaaactgtaaacttcattgctagaaattaaatggtttttacatcagagaagtccaaagaaaacagagcctctttggctaaagcatccgctgagagatttggtaaacgaaaaatacaacagaatttgaaagatagaagtgaacgacacaaacaggtgatgtcatgaagacatctaacagaatttctttatataggccaatttaaaagtgtttggcaatttctttattgcgtataaaggcaactaggtacgttactcgtatttcggaggtgcttaaagtaaactagggtcaagtcagtgaccttgatacttcgtttttatgagaaatgttgatgtccaacattgtaatgatataaagtcctacaatcttcagcataaagatctatgtaaggctcgtgttctatagtatgaacacctagacagtttgtttcgaagaaaattggatcatgatcaaagaattgcaaatgaatgagtagactatataaactagtcatagggtacccgaggattcgaattctatatcaacaagctcatcactcacgaggagcggacttaacttgtttggactcaacagcgttgtgattctttaaatatcctaatatcatgtgattttttaaaatgtcttccaaattgtttagaagcaaactatgtacttgtgtaaattaaacgcgttagaaacatatgttatcgatatcaatttctagttcaagataaataaattgtagaaccgtggttggaatcgtatcatcagaaggaaaaagaaacatagatacattaataagtctttcaagtagtgattcccacgtcctacattactctttaaccatttttcttcaccgccacacaatttctccacaacatcttgtgaacgtgtaaacccgtttcgtcgctggcaatgaaaatcacattcccatcccttgcttattacgcattgacattgccgagtaaataccccaatcagaagagaagaaggaagaagaagaagaaagtgtgtttagaattttgggtgacgtggctgtgaaggagagatagcgcgagtgagaagacgcggaaagcccgaactctcgcggttcggcagctccgcgtcagttggtcgaatcgtcttcgagctatctcgttgcttttcgagagatataatggcggaggaaaacgaacggcatgccatggacattagtcgcccaaccaatatctctcatgtggctcatgtaacatacgatcgcttcgatggttttcttggtcttccttctgaattcgagcctgacgtacccaagaagccccctagtgcaaggttcagcttcttcttctttctaatgtaaaccgtgaattgggttgaaacctttgccatgattatttttgggtttgtgtttgcatttgaagtttaagattattatgacattgtaaactgcaaaagaaaatgcaatgctagttttgacattcaaaacaattagaaattctatcacaataatcctaaaagggattcaaaacgttttctaattggaaagatgatcagaaatccatttaacattgactatataaattgtaatctaatgtagtatacaagagacataaccatgaacctttgagaacaatgttttggatatattatgttctaagtgacgttcttgcttcatgatttgttgatctgttttcgggtttgcagtgcaacagtgtttggggtttctacagagtcaatgcagttatcatacgactcgagagggaattgtgttcctaccatactcacgctattacaaagccggctatacgatcaaggaggtttgcaggtagaaggaattttcagaatcacaggggataacagtgaggaggagtttattagagaagagttaaacaaaggagtcctaccagaaggcatcgatatccactgtctcgccggacttataaaggcatggttcagagagttaccgaaaggggtactcgattctctaccatctcaacaagtgatgcagtgtgagtcaggggaggattttgtgaaggttgtgagactcttgtagagtttgaagttgtcaacaagatgacctcccgtaatctagctttagtctttgcacccaacatgtcccaggtcacttcttgcaccacatcacaattttccaagagtttcctttttttctctactcacattgatcttacacagataatgtcagttttatcttagtgctaataccagaatgcatcaatatatcaagcctctgatccgcatactgggtctgttttggttttactgcagatggcagatcctttaacagcattaatgtatgcagtgcaagtgatgaacttgctgaggaacctcacagacaaaacactcagagaaaggaaaattgcgacttcaaatgtagatccttgtgataacagaagtgaagctgaagatggtaatgtcgaagaatataatcaagaagtagaaatatatgttcttgaagaagtagaggaagaagaaggagaagatgttgatgatctggacaacgaagaatccgagagaataacactgcttgctgatgaacacaaaccatcaagcgcagtgaatgctaatgatcgaaagaaacaagaaacatgaagacagccgttggagttggaaacgtcgttagcagtattatgtgtttcgattgatttctctttttcgttatcgaaggtgcatgtaacttaggctaattgttccaaatacaacttatgcattagtgtttatataaacgtatcgaatttttttccatatgacaacctagaaagatgaaagtgccagaacaaattttgagatgtattaaactttttctggtcttttatttttgggcttacttaccctttaaggttaagccagtaataattgttgttaatggatttccccagtgtgatcttaaacaaaagatcaaagcttccaacagcaaaagatttagagattaccatccatagtaagaagcaccttgtacaaatctggacgacggtcacggaacactccccagctttgccttttcgacttgatcatatcaagatcaaactgtgctacaagaacagcttccgatttatcatctgcctcggccacaatttcacctgttggtcctgtcatattataacaacaatattgtgacaaactgttgggaaaatgcttattgataaatttgcatctaaacttcaaaattactgatctcatctgaataagttataaactgataccggcaatgaaggaagttccgtagaaagtgatctgactaggtccatgctcagtttcaattatttccttccctatgcgatttgaggctactagaggtacctgaaacccaaagtattattgcctcactcattagcaaaccatttgaagcacattttggcaagttctaatcagtagaaataacggaacaaactagatacatgtaatctatttctaatgttactgtaaaatagctttcagttataagttaggctcatagcaatccgataagacactaatgactttgaaaactgagatgtttaagacataataatagcttaccacgttagctccagcatgcccttgcataactctcctccaatgatcacgcgaatccaatccctggtcttgaggttcagaaccaatagcagtgggataaaacagtatttcagcaccctgtagaaccatagctcgagctgcctcaggaaaccactgatcccaacatatagctaaacaatacatttcattagtacatcaattaagatgaagtaacaacgaaaaggacattagaaacagagttctgcatagagcatcttacccactccaattttagcaaacttcgtctggaaaacctattcaagccaaagggagaagaagagatcaatcatgtgaaccaaataacataacagttcaatttgagattcttcttttaaaaactaccttaaagccagtatctccaggattgaaataaaacttctcttgataaccttaagataaaaagaggtctcagcaaaaaggtaacaagaaactcaagctatatttccaactccaaacttgactcaccaggtccatcaggaatatgagacttcctataaattcccaagtcagttccatcagcatcaattatagcaatcgaattgtaatgtgcagtatttgcctcctcaaagaaactaacaggtatcactacacccaattcctttgccagcttctgcatcctgtgttaaattaaaccatccaaccattaaaacactagatagtacatagatacatcgagattccactttactgcgttagaaatcggataagcaatgtcacaccttgcaatggtaggatggttcttgtaaggcttggctcgcttaaagaagtcttctctttgtgcttgacagaagtaatatccttcaaaaagttcctgttatacagaaactaaactacataagactagctaagacgattggatactagatcaatcaaaaacacttataaatctgagaaacaatttcgaagagcaacaatgacctgaataagaatgatattagctcctttagcgtgagcttctctgactaatctgcgtaaaatgtaaacaattccattctcagatactgaaatcggattcgaacgggggaatctatatcagagcttgaaattgaatagttcgattccaaaggtccgtgatcacaataaattgctcgagaagcttatacgcatatggaaatttgaaggaggaggaagatgggagagattgataattagagagagggagggaggaagagagagagacgaaccgctcagcggcggcgacattggtggagatatcgtcggagcaagcgaattggagagatgaaacaaccacttctcgtcttcttccttccgtttccattgtttctctctctttctctgtgttttttctcacagtgaaggaatttaaggacgctcaaaatcgaatataaggtagctgactcatttgactgtgactagcagagagaacaaaatagaacagaacattttttcttttccaaaatcgaataaaggcgttcacaaacgcaaacgcaaacgcaaacgcagacgtaaaaccccaaattgagttggaacattttagatgttttatgaatgagggatcctaatccttgtatggtcttattttagattcttctacacttatctactatatgcacaagacataaacaagttgatacaaaataagtgttggtgggtaaaagttacattggtggatttaaaataactaaacttggaacataatcacttagaacataataactgaagagaaaccagagacataataactgaagagaaaccagggacaatatttcaattggtttgtacaataatcgaattttctgcaaccatgccttccaataatgtacatcatgttctccgtgaaatcctcgcatctcccacaatacataatcactttcttttcttcatcaataaaatctgtattcgactaaacaatctcttacctagaaaactagaaggtataacaatattcagtgatccaacaagatacttaattgaggagtcttgtacttgatcttcaaactctttgatgtctacattgacaccatattgacgttatcccccgagtaaacatagagtataatatatcttttaagttcgagctctctagaagaacaaaatatagtgaatttcctcaggtctttaatcttcgcgatgatggtcttatacttgagttgttgcatcactccatgtttatacatatgtagtaccatcactacttccacctttaaatcattggcctctttgatgttggaaaaaaaaacttccaaaaaaaaaagacgttcacaaaagctaacgtgcgctggagacgaattttactggaaaagctaacgtgcgcctaatttccaccgtgctcatccaatttcaccaaatctccgaaaaccttaaaaccagaatcaaaattttcacatttggaaggatctgatctgaaacaatggcagtgagagcaacggtgtcgcgttttccgatcgattcagacgctcaagaggcgtcaggacttccttggggactgacagtaacaccattcgcggccaaagacgagaacggaatcggaccagcgtgcggatctaacggtcatcttcttcctcgttgcgaaaactgctacgcttacttcaatacctattgtgagcttgatcaatgggcttggaattgctcgctttgtggaactctcaatggacttccttctgatgctattgctcgttactctaatcctcactctatacctgaaatgacttcctccttcattgatcttgagatgcctcgtatgtcttacgtcatctctatactgattcttttgttttttttgttggaattggttctaatttctgattaattgtttgtttttctagtggatggatcggaggaagagatgacgcaagcacgacctgtgtatgttgcggcgattgatatctcttgtaaggcttatttcttctatattgtgttcgaagctcattgtgatcagtgtagattgtacttgaattgtgtgttagtgaactttggattgtgaattttgaaagcaatgtgtgtgtcattttgctatggattatgattctagcttgggtttgtatgcttttttgttgttcttatcgatttttggcttgcttatgttgtgattttgtcatgactttggagatagggtgtggtagcagtaaatttgtttcgaattttgttcaaatgttgcactttttgctcatgattatttttgttatctgcagcttctgaggaatttttggagcttacaaaaagtgcattgctagccgctctggaaggtcgtttcataccaaatttaaagcaaggatttactttttcttctgtgtgactgtgtcctgaggaaaacaattctctcgttttttcgtatatgcagctctaagtccaggggctctttttggtcttgttacgttcagtcacaaaataggactgtatgatgttcaaggacctataccagttgtaaagaatgtattcattccccctgatggggagagcagcttatcgctagaacttgaggatgtcatgcccttgttacaatttttggctccggtatggtcattttttaacatcttgtttcctgtttcctacttccttggtcattcaaattgattgtcggatcacatggcttggaatacctgttgacagactaagttctctttctgtacttcctgcaggtagaaacttgcaaggatcgtattgctgctgcacttgagacactcagaccaattacttcttgggagagatcagctggagcaggtcaagggatggatagtgtgttgatgggtggtaggggctttggtacagctatggaagctctattcaactatctaggatctgaatttgggaatacatttgcattaggtatgtgaaattatttagcatgcccatactctatatgtttcaacatagtcgtagtggccagttggtattgttttattgacttgatataagtgcagctagggtgtttgctttcctatctggtcctcctgattatggacgtggacaattggatacaagtagatatggtgaacaatatgcaagtaaaagggtagatgctgatcgtgctctacttcctgaacaaacaccattctacaaagacctagtaagtcttatttcaagattttctgtctccggaatggatatattctttgagcttagatctaacggctcttttataggccaccattgctgtccaatcaggtgtatgtgtagatttatttgcagttacaaatgagtacacagatttagcatccctgaagttccttagcattgaaagtggcggttcactgtttttgtattcaagcactgatgattcaactcttccccaagacatgttagttctgattcttggcattatatttccactccaatagaaataaagcatgctgtgttttctttacttgttaccaacttaattgaagcaaaatcgcatgatcttcttttgtaggtttcgaatgcttaaccggccgtatgcattcaattgtgtcttgagattgaggacgtcaactgaattcaaacctggcaactctgtatgtggttttagtgaaaaccgaaagttcagataatgattttttttttttttttttttttgcttcagctaacagtttagccttacttgcagtttggtcacttctttccagatccacagtacgagaaccttcagcatatcatctgctgtgattcatatgcaacatatgcatatgactttgaatttgcagataacactggattttccaggtaaacttaacaataattgctttttcctataaaattttcatgatttggtcgaagggacgatattgatgatgattgtttccatgcaattgtaaagctgctagtcattgattttgtcataatgtgactcttaatacatctgtaattagtcattgtcatgctttccttgacctgcaataaagtaattgtcttaaaaaaaatttatagagctttttactatattattgaatcctctgccaagtcttttaactaatatgataaacggacttggcacttaaagatgcttacttcttgtgctcttttccaggcattctggagagcaaccagtggtgcaaattgcatttcagtacacagttgttgtacctcccgagggactgtcaaattcagaaatgtcatcttcaagtaggtaagattcaatccatgctaaagctgttgattgattgtagtcaaatggggctatgcttattattggaattttttatcgttggaacattcatagtagtttgtatcctagaaatgaatttcataccttgcaaatccatgtcaaagcctagggttgatagtaaacctcgaacctcccttacattaatgaccttatactcggtcaatcccagaacccaaatttgtctttcatgataattaatactgtggatcttgtagtgtttcaatctcggtttgattttctctgtgttacacagaggcaagcacacacttcagagacgattaaggatcagaaccatgcaatttggaactgcccacaatatcaatgaaatttacgacagtgtggatcatgaagttgttctctcattgctcgttcacaaggtaaaagtaatttcatgtttttatctcggctccagcgaaagaaaggaatccattattaatctgctaattatgtatgtattttcataattatttctctgcaggtaattttagcctctctggaagatggagtcagagaagggagggcattgctgcatgattggctagtaattctaacagcacaatacaacgatgcctttaaccttgtccaatacaaaaacggaaataagtcaatgagttctcagattgatatcacgttttcacaatgtcctcaacttgagcctttgcctcgtttagtctttgccttactccgtaatccccttctccggtttcatgaagaaggtgttcatcctgattacagaatctacttgcaatgccttttcaggtaaccatcccaatgaactactaataaccaacctagagtcagcgtgaacaatattgtatatttagtgtattttttcgatcgtggatttatttggaaaaaataccttggtatctcatgtaaacagaccacaagcaaggctttagtctctaaatttcgtgtttgtgttcttctgttttgttttccttaaaactgcagtgtgttggacccgagctctcttcattgcggcatttacccagcactaatgtcatattcaacaccggatacactggcatatccgcgtcattcgttgagccgtgcagcattgataacaagtggtagtccgatatttttcctagatgcatataccactttgatagtcttctactcatcaacagcagacccgtcaatacctttccctccacctcaagactgtaagttttctcaccaaatgaaatccagttcaaccacctttagatctttgagactatgttgattcgaaaacttatatcttacaggtttattgaggcagaccataaataaagtgaagcaagaaaggagcatcacaccaaaactagtgtttatccgaggaggacgagacgatgctactgtctttgagaactatcttatagaagaacaagatgtggacggtaatggttttgctagcgccatgggtttcgtgtctttcctcgatgatatttcgcagcgtgtcactgaatacatgaagtgaaagccaaatgaccctctagtttattatacatccaaactcaaaattttcaactgtgtcagagttttactcttcttgttgtaacatttgctttagactagcatcccaacttttttgctctcttaatcaaaatgaataattaagctaaaattttgttgcaaaacttcattttctaaactttgacttacatatttggtaacactagagccaaagagcaaaaagatatgttagtctattacatgctcatggccacaaccactgcttcaagcttacaagctaatctccaacataaacctgaaaacatgttcttagcaaaaatataaccttgagttcattcatcttcttcatcactctctacctcttcaccacttccacttacgctcccgtcctcgttctcattatcttcaccaaccccgctcccattttcttccatgctatggtcctcattcccgctctcttcgctctcattcccattctcttccatgctgttttcctcatcctccttctcgttctcctcatcattcccattctcttccgtattttcatcgtcgttctcctcatcattcccattctcttctgtattttcatcgtcattctcatcttcctcatcgtttccattctcatcctcctcatcgtttccattctcttcttccgtgttgtcattctcagtctcctcgtcattcctcttagtttcctcatctattttgcttttccttgcacccttttgcgtagatggttcttcctgtttcctcttcttcgtctctttgggcttcgaagcagttccacttgaagatttcaaagcagctccaccagcaggatacgaagcagctgcagcacccgcctttttccccgcattcttcttcttaaaatctgaaaaccagtcatgtggattacactaggattgacatcataagctcaaagtgcacacacctaggccagtgtccataacaagacaaatcacaacctaagccatttctactaacactccatgaaagtaacaacagatagtgacaataggatcttcatccgaacaaaacacttaccttcaagagaagatttaagcggctccaaaaattctgaaaaatccatttcttctaatgccttaaacacatcatcagccttcatagtttgtcttcttgcatctttacaaaaatcatttgccctatatcattcacccccaaattaaactaaatccatcaattcgatcgatcacaattcacaaacactaacattcatcaattgaatcacattaacataaacccaaacttggaacattccaaatcattcactatcatagtgcagaaattcgaaaaaaagttagggtttgtgaagtgtacatacgtggcggagaggtagtggatgaagatcctcgcactctctgagaatgcgagcaaagcttccttgtgaatactgacgtcataatccggcgaacactccgacagcttcttcttcaccacccggcgcacaatagctagcggcagctcgtccaccaccactttctccgactccattcttctctcctctctctcagtcgccgtctttcccgcctttatgttaataatacaacaaaacacatcggcccagtaagctgatcagcctattaaaatatttaaaagcccatattcaagtttataagcactaaagagttatgaccacgccgctcaatattacccgttggattgattgacaaaatcctagccgtcaaatcgtactagcaaatcggcccattattcaaattgataagcactaaagagttatgagcacgttgtcaatctcaccgttggataacctttattaaatcttcaccgtccaatcgtaatactaataaattcgatcaaaacacgaataagaatcggagtcgtcttcaacctctggaatttgagacatcttcgaataaccagattctccgaattcgagccatttctaagaatttcatactctgattaatgtcttactcaaacgcctacgcaccgtcggcaccggagctaccagaatcgttcgttcagcagcagcacgatggtgaaagtagatacacttacgcgtatccatcatatcaaccaactcagcaattcagctcttactccgggatgttttccccggaaacgcatccggagattgtgaggagctttgagtcggcggatagaaaccggagcggatttctcgaagaatcggagctccggcaagcgttgtcgttatctgggtacgatggaattagtaacagaacgattaggttgctgttgtttatttacaagattcctgtagattctctgcttcggcttggtaaattcacttattgcagcttttgaaattggctttttgatttcaaatatgaatgatgttacaaaatagccatgtttctacctttttatgtaggtcctaaggagtatgttgagttatggaactgccttgcgcaatggcgtgtaagtgaacacttatgtggatcaatctagttgaggcaatgtgtgtattcttctatgccttaaaagttaaaaatggagtgttacttttcaatgtgtgttcttttgtaggcaatatttaacaggtacgatagagataggagtggaaagatgaattctacccagctcagagacgctttctataatctcgggtgcgtgcttccaacctcggttcaccagcttatcgtatctcagtttgatgatgggactggcaaaactgttgacctatgtttcgacagcttcctcgagtaagttttctgtatgttttcatcgattcttgcggttcttaatttgtatactaagcatcatcggtttgtttccctcattttgttctgcaggtgtgggatgattgtgaaggtatgatcttttaacctccatgagaatttcgacaatgtgtttacatgaatctaaaccacttgaaattgtttaaaatgtgtcgtatgcttattaacagggattgacagagaagttcagggagaacgaccctggttacacaggctacgcaacgctctcttacgatgtcttcatgttgatggtcattccgttcatcgccacctatgattaatggtcacttgctacttctttctttttctcaatcacagattcaagttgtatatagataatagatgcctgagtactgactgaataggagagtgaattcaaactagtgaatagtgtaataagctaatgctgaagagagcaagagaataataaatcaaagctttaagattataacaagttttttagcagtaacagaagtgaaatgttaagagccaattttgagctgtttgcaaacagataatcctaaaatcactgaaccaaggaccgagaaggctccttgccttgaacgccaaaactcgatccacgtcaatggtcttctaatttcaatcaaaaccttctcgaactgttggtgaaggtcgtcaagagagccattattatcgatcacaacatcagctttgcttcttttcgaatccaacggcatctgagccatcactctgtttcttgcatcttcctcactcaatccatctctctccatcagtctcttaagttgtgtctcttgactaacccacacaaccacaataggtttagtccatttatccatcttcacttcgaacaacaaagggatatcgacaactatcactttagctccactcgcccattgtttcagaatttcccagaagataccacttgatatgtatggagccatcagcctatagagtgaaagacacaacttccaaattcagaatcttatacattagacaataaagggaattctcaattccttacttgtttagaagttgacgcttggaatcagacgagaacacaatctgaccgagttttggccgatccacttctccactaggaagcagaatctcctcaccaaaagctgcaacgactcttttccatccaccgcttcctttcttcaatacatcctatatagtaaaacaacacatttccacatcttttactaaacttctcttgagctaaattgcatctaggagtacatctctcttagcaacggtgacacaatagttacaaaagaattccagcaagtagaaaagagagatgtttgttccttactcgagcaacaacatcagcgtcaacaacgggaatgccactagccttgaagaggttagacactgtactcttcccagacgctatgcctcccgttaacccgactattctcattctctttttcccctcttttactcctcaggaacacttatattttcccagtgtacaagttacaattggtttcttcaggattttccttcaagagtagtagacaaaaccagaaatacacaagttaaggatctgacaacgtatttgaatcacacaaaataaaaataaatactgaatcagggttttagaaatcaatgaacaaagcaaaattgaacatgaatagagtaaccacagatattgaaaaatcaatgaacaaagaagttttttttttatttgtcaaagaaatgaacaaagaagctaattggcaataaaccatagataaagagacatcggctcgaacaggaaaaacagaagagtggagaatacgaaagagtaacctcctcagccaccggaatacgaagaaatcgacgccgtagatggacaaaaaattggggtaattaattgactataaacatcaaagtgactggaccaatttaatcctttctatctatgaatctaaagctaagttgaacatgaattgagtagccatacatattgaaacatcaattgaacaaagaaacaaattggcaataaaccatagatgaattcaacaattgttgaggagatgttttttactgcattttaaaccgatactgtatcaccacatcttatgaattcaaaactaaaaacatacaacttcaaacacagacatatccaaccaaaaagatagaatctgcagcttatgaattcaaacacatcatatacaacaagaggaaagataaaaacccaaatagcaacggaagcaacaaaggccaaattctcaagcaattcacatacaaaacatgtctgaactactaatagaaactcgacatgtacctattcgtatcgagaataaatgaatcgacccacaatttcaaatcaaatatgaatcaacccacaagttcatagctacacaaaattcaatttttccagaccaacctttagagaatcacctttagagaacacacgaacactaacacactttaacccagatttctttgagctgaaactattaaaccccaaacatatgaatcagattccaaaaatagagaatctatcaaagtgtaaaaataagaaagatgaaagatatagagagacaaatcaaaacttttctcacaatcgatgaagagataaaaaagaaagagatcgaagaaaagattgaagaagaagaagaagaagagagcgtttgaagaagaagaagagaattttatatcgaagaaaaaacaaaaaaaaagaaacaattaagaaaagaaaaaagttttaagccattgaagcccgaaaccttttctctactttgatttaattagggcttttaatttatttagtgggctaggaccggccctaaatgttaagcccgttttaacatccctaggtacatataattgtgaacactatacgggcacacgattaaccttttcatcaaaataaggtagcgatgaatgatttcagttttggctaacaaattacaaaaaaaaattgctttatgttcaaacatagctagatcttcaaaatatattatggagatacataataattcaacatgcatgctcttgatataaatttggattctattaatattaggttttattaccttccatcttggatacatgtacattacatacgtgttggattggaaagaatgttagaaaacataatagccataatcctcatgaaaaggaaggacagccgtgtgtgggtaatgggtatagagagaccttcgtggaaaaaattagtgatcccaaatatacgtgaacgcatatgcactcatcaatactatactttgacttcacatctctagctcgaattaaagtttgatacaagaaaaaaaaatcgaaattaaaatgacctttaaaaaaaatgacatctttatagtttataccaattaattatttgacagcttgacacttcaccaagacccacattgatagtgtgacaccttgaacggatcagattcgaatatgtaataatggcagatcgagcaagaagtttcatggacccatatatatgtacttttttttatttgtacaagtacgtttgttatatgcatagttaggaacttttgatagatactgaaatgggaatgccttccagaaagaaaaaaaacgcattcttgagagtgtttggcaccatgtcagtacccaatgtagttttgtaaggtggctaccacatgtcatgtattgattagctgtcttctaagcatccaaaaactaacccacattaggtgattattacatatcattatatgtcttatttcacttatcatatagaaattcacacattattaatcaatatttttttactaatttctaataaggaaattaggaaaacagatttgcgtccactataacatccacgtaaacttcgaagaagcttttgttgaaatgtttccgcaactgtagactaatttcataaccattgaaaaactctataaaattcatgaattaataattacgtttagagactgttgtgagaccctaccgcgtggtaatgccgaaggtaaaatgaatagatatttgaaaagaaacacttttgatggaacaaaccgactttttgacaatctcattaaactattgttgatggtaccaatggacttttgtatagctgaagttgtgaggaacatttttttttatcacgagatatgattcacatgatcatagcaagttgaaagttaaccaaaagtggtgtgacccacatttaactatgttaataacatactaattttgtaatacacacaaaaaaaatagcataattacaaaaactagcttactgtattttagaaagaaataaaaagttgagctaaagagaaaacaaagatatttaaattgattggttaaattgtggatcactagatagataaactttttctttggtgaataatagatagataaacttagtatttaatgatgtatcattaaggaacttaaataaaagctcacatatactcttagcataatcacataaaattggctttcaatgttttagaaaaataattgagctaaaaagtaaacagggatatatatatatatatatatatatattgatggaaattggttgaaaattgtggatttagatggatacgttcagtttttaactatttatcattgaaacttgggttgcagaaacataaaacctaataaaattatatttactcacagattctttataatattttagcacaatttaacaaacaaattgtttaaacatttttccagtcaaggaataaattaatttttttaatttttgtgaatccaatacatgacaaagaattgtatacctcacctataatcaactaacatattaaaacaaaaatcctacaaggacagacaaagacacaagcgaagcttatctcatcctcatcttgtcgcccatatcgagtatgaaccaagccacagccaaacccatcacgactctccacaaattcaaaatctgcacaattattcaacatccacattatcaatatcttatcatatataatcatatatatatatatatatattccttaattttaatcataacataatatataaactaatagaaagtaaaaattctattgtttttagaacattttctcaaaacaataatgaaacaaaacgttaaaaatgtaaatataaaaaatgaaaagaggaatttaccttaattgtagttgcccttgaagtatagataatatcaggtaaataaccttgcataccgacattgtaaaccggtttaccatccggataaaaaagtccataattcctctcagaaaccggacccggtttaagattctcattaaacagagcaaacacataaacatcaataggaacagattgcttcgccggagttcctttcctctgctgaatcaacttcaacaaattcccattatacaaagccgcgttctccggcgaagctccaatctcattctcatctcctttagaaggccaaccggtttccgatatccgaacctcgatatcggtatgtcccaaagtcttaatggcagagtaaagcgcatcaacttgagcaaacaacatgttgtcataatgaagattagtgtttggatcaaccataccttgattaggttgaaacaaaacatactctaatggaacttctttaggactatctttataagcaaaaaagggataagcatttatcaagaaaggtgattcgatttgagaatgaaaatcaagaagtggttgaagatattgaataaactcttctttgaatgatcctgaagaaggaggataagatgttgaaagaatgtctaaagaatgagctgaagttacggttacttgtttctctaaaccaagattggttaaagcagcgtaaaccgatttcatagccggtaataggctttggatgaggacatgatcattggttttgaagatttcgttgccgacaactattgaggttattcgtgtttttgagatatgtggttcaagtctttgttgtaaccaatcttgagctttggttggatctgttgacatgttttgaagatactcgttgcctaaaccgatcatgaaatctacttgtgagtttgagaaggagaagaggacgtttggatctgcgtcgtagagttttactcttgtgatgtttagtgatcgaaggagcacggcgactcttgccggagatgggaggttgtttgctatttggccgtagttgattcccacaccttgccctttaattctctctacatagaacaaaaaaaaaaacacacacccaattagaatctaagttgaagcaaatttacatgctcaaaacaaatattgaaggaggaggaggaaacctgagagagtaagaaagaggaggagaagaactctgaagaagaaggagagactatgtgtggccatggcaagaatctccttctacgacgtcgtttttttagctcctcttcttctttttcttttttccttttgagttttagtttttggtattaagaatatataagagacggtggaatttggaaagtttcaactgttctttcttcgtttcttgctttccgcgttcgtcaaatagctctaaccaggtgtctctcattaatgcatatacctatgcctaaacttatattcctatattacatacattacatattttatttgtttttttcttccttttttggtatcaagtttgacatatttcttttttggtacaagaaaaataaataaagagaatccaataagaagataacccaatagtaattggtaattcattaggaattttttttctaacaaaaaagtttttaatctagaatctatttattttttttttttcaatcgatcatttaatgaaataaaaactttttttttttttggatgtttacttagtacacccgtaagtcgttaaactatcgacatcgagttttactattatttttggttataaacttattatagatataaaataatgtgctttatcaattgcctaaaagtgtagttaaatatgtatgattttgattttactttatgccctttacagctcaactatatataacgaatttggctggtttctttaaattacatgtatgttaatcaaagaggaggaataagtagtaggtttagttagatttatggatacaaataatgtaaatccaagctgttctacttctctaccttccataccttgaatattctaatgtcaaatagtttatatactattaaatttcacctacaacgaaacgtcacttgtaatgattgttttccttacgtcaatttacgttacaatttttgacctctcttttggagaaataaaaaactgatacgggaagttgatttttcgtcatttcagttattgcagtcattaatatacaagtgggttatataatatgatttcaattcctacgtgacatttagatattttattttctaaaaaatatcaggagatttaccgacatggaaagtaacgttcccttttggttcacatgtggacgtgtgacgaaacattattaaaatatgaacaacgatggttaaatattgggagtgagaatggtcaacttttaaactcttccccaactggtcttcaattcaaacactccatgaccactggcggcttcaaacaaaagcaaatttcacgattcacacgcacaaatcatattctagttttataagtttatcaagttgcaatttgcatattagatcgaagacagaaagagacaagttatgcaatatttgttttcttgtatcatgtagtatgtatgattgttaggattctttactttgatcgtcaatgtttctaaagtttacaagtaatgaaatagcacacgtacgtctctttagaacttgagttgtcaaacgtgtggaccctctccaccagatttttacgtgtatggtgttttgcatgttggatcaatcttttctctaatcaaggattataattctctttttttttttttaattctttatttaactctactttgttcttcgtcaaaaaattttaagcatccataattctctgtttttgctttttcttatttatatacatccttgaagatcagttgcgaggagtaaataaacatctaccaaagaaaacacaatcgaggttacttaaaacatcagtatatacttctcaccaaaagagaaaaaaaaaaaacatcagtatactgtcttttaactttctaaagtttagttcaaaatacattttttagagttttgaggtgattggaaagaaaatgaactaattaaacgatagtgttatagtgacttgtaacatttaatatctttattagggttatcagattactttttccagtttcaaaattaactatgaaactatctttatttggtaaaaacataattttaaaaagttacttttcaaaatcatatatttctatgtcgacgtaccagctctaaatcaaaaaaaaaaaaaaaaaaaaaaaaatgtggttgtcctttagcactctgatattatttgtccaatattcggtactgcccacttatatctttcaccaacattttttatcacatttaattattaaaaaatctagtaaacagtttttttgggttagaaattattcataataaaaaaatcagaaagttaactaaaatatgaggaatttaacatgtagcgtcgtgattcgttaaggaagcgtgaaccacagagaccggccatgtctcgatcaccgcctttctctgttactgtcacctgcccttcctaacctcgccgccttcaacgcctgatccactcacgtgctttttaaatttctatctcaaataatcgaatatattcatgtgtttcaattgatttttttttgtgtgtagtaaagatgtgtttataatttcactcaatgtaaagaatttaacagatagtttcatacgaactaatatttaaaaatacatataaaatctaaaattagtatgattttgatggacatgatgagatatgtggtgaactattatgggcaagagggaatcatctagtcatgaccacgcgttccactgaaaataatctatatgagctccactaaaattgcttaaaataatttacaattttgttgcaaaaaaaaatcgctaatgccttctatatatattaaagcttgtgctccattttgtaacttttatatgctaatctaatatagtcttaaatgtgagttgtatttttcattgattgcatataagacatgctttattgacttgttcgcgaaggatctgacctaatcgaagtcaggaaattacttggagagcactcaaagaacaggatgcttatgtcaaaggtggagaatcaagagtgatgaattttgattagattctgatgcattcatggtagctcggatactctcataccttaaacttccgacaggcgattccgttaagacgagcgttttgtcgaagagatgggaatttctctggctaatggtttcaagtttggacttagacgtcatcaacttgtctcgtgacggcggagaagccttggcgaggttcatgcacatgtttctagagttgaaccgtggatcatcatcatgcctgtaaaagttcaagataaagtatgctcattctcataatggacttctttcgattttgtccaagaagagaaagcatgacgactccatggacgactgtaacaaaagagtcatggagtggatagccgaagtagtccacggcggagttcaacatctagatgttgatgccaaaacgtgcgggataattcaatctcatccagatatatataagagcacaatgtgttcaccttctgtagattccatgcctaagtatgtttatgtgagcaagacagtggtgtctttaaagctcgtaaaggtagggcatgaggatcccaagtttgttgtttctctacctagtctcaagatgatgcatctagaaaacattctttacaagaatcatggtgttcttttgattataaagatgctcctctcaggctctcctgttcttgaagttcttaccttggtaagacattttgattgatgataataataactctaaacttctgtcttttaaactcatctacttgcatttttcgcaggactttcccggtttaacggaggcaaaataaatcttgttttgaaaggagttttctgttccagttctaacaatgccaaggagtaatttggatttagtgcaagactatttttattcatgtaagccaggggaaatagaccttactaatgtgcctctgtgtatgcaatcgacgctgaagtatgttaagatcaacaaactgataacgaaggaggaaagtgggattaaagtagtgaattactttcttgataattcagcagtcctcaagaaactgacacattcttctatggaggagattcaagagccagagagcttcatgaagcttcttacatccaccaagctttctcgcaactgccaagttttcattcattgacatgcaaatgatgatgctggtgaacacgtaaagcttttttcattgaacaataacaatagtgtattcttgtttcttcttacctctgttttgattcttaatcaatgtaatattcatatagttaaaagcctattttaacatgttactgaatgataatgatgtctacttcatatctatcaagtgaggaaaagaaaacaagttcaagatgatccagtaatgaacacattaaccaattatataacaagaatgattggttgaaacttaaccattttattaaccaattgcgacccggtgacgattcatgaacactaaaaggcatatcttgagtcattttcatacaaatgcatacctttaaaaccacacaaatccgtagaacgaaactgataaccataatatctaaaaagatcactcaaataacaattttttcatcattaccaaatagagagactttgacttagaagagttcagtttccttgtgggtatggatcacacagtcagactgtgggtaagccacacaagtcaaaacataacccttctccaagtggctatcctcgagaaacgaaccatccgactggtcaacgttgccggacacaatctgacccgcgcaagtagaacacgcaccggctctgcaagagtaaggcaagtcaactcctgcctcttcagctgcatccaagatgtactgatcatcttgaacctcaaactcatcttcttgaccatcaggtcctaagagcttgaccttgtataccgccgacatcgtagcaccaccagaattcgctgagcatttcaaaccaaaagatctcgaaacccttttcgttgatccaacagataagttgtagctcttgttagtaatgagcttgttggttgtctggcttctaagaacggccttggtcatgctagtggaggagattcgtacagtcgccattcttgtttatcacctgcgtttataaacaagtttagcttcagggtttcttcatagtgatacaatctaacaaatcaaactgttccagagaaataagaaccaaaactgagagaaaattgtgaggatgtgcatcacaagtagcaatggaaacaagaaccaaaaacttatctgtttccaatagcaaatatgatgtgaaaattagtgtatggagcgtaatgagaagatgcaagcttaaagctatattagatcttcactcgatgctccaaaaacatgactaaatgacttacttaacaatcactaaaacatgtttaattacttatcatcaaatagattctaaagtcgatcaaagtagcttaatggcaaaaataaacctacaacagacttgtaacaagattcactaaataacaacaaaaaaattcacaattaaggagatgattagcatctgaatagcaacgatacaggatcaaatcggtcactatcagataacgaaaaagagaagaacaacgaaatcgaaagatatttgattgtttttttttgtccccacaagaagtcaatgaaaaaacaaaaaacaaggaacaagtaaacatcgctgatcagatcaaattctagaaacaaatatcagagagaatcgaagctaataaagtcaaatctgaaacttacgtagagaggtagcgagagagagagaattagggaagaaggtggcggagagtgcgagagggggttggtggaggagtcttgagaggtggaagcaaaatatataaaaggagagagcagtgtggcttttggaaggccgtgacggcccaacttgtgtcacctgagacgtcttaattatttgattatttttcctaccagattatttgtttccattattctgctgtttttgattttatatatgattcatttaattacaaataaaatgttttcgtaacttttttttttcttgagttaatttttcattggattttctcgtttcgcgaaaatgaaatcggatataaatatagttttggtaacatatagtgattatcaatgaaaaaaagaagtaaataattgtaattggtaatgataaaaaaattgaaaataatttttttagtgatgctcattgtcattgtttttatgattgataaaataatatagggtttattattgcggtaaagttttaaacttttttacttttaccatgttttctgattttatatcataataaaatatatgtcatgtccttattcaattttatgactagcttttaaagtaaaagcaaaattttcaacttattttgaggcctatgatttgatgaatgtcatgtagaatttagaaattatttctttttctataagtctacacggttaattttttaatggaaaaataaaaatgattgtaataaacctcatttagtattaatattcggtacttgatcgtagatgtgcaaaacagaattctttttcttttattttaggaatttttgataagtgtagagagaaacaaaagcgttggtgagtctgacagaattaacggtatcaacaatagagagtcttttccatttcctatgttcaatatttacctaagtttggtataaattaccaatgcaatgtcgtttgaaagattacaaacgagttttcatgctattgttaggtggaagaacttttgtgattcgagcaattgtacatatagctctattgagagagaacaatagttgtacaaaaaacaaatgtacaaataaaagatgaatgatgttttgttgttcaatgttgtatagtgtcttttacttttcaaataattaaaaaacaaaactgcaaaaatagtgaccatgataactataatttggtaaaaattatattatgtaaattataaaattaattttttaatttttatttttttaaaacacaattagttatatagacattatttataatgtgaaatcttgatacatatattaatatattttgacatatggcgttaaataataagtaataatttatgacatatatatcatactgatatgtaaacataagatactactctaaaagtctgtttagatgtgtacttacaaaaatctgtaaacataagatactactctaagaaagtctactagctccaattttctagcataagctttttcttaacatacatttggcctatggttttcttaggtccttaaatagtttttgatattattcacagcgaaattaccgaatataaattattcacattttaatcatagtataatactcaaacttaaatatgacagccttaaagcaacacctctttaatctattgaattaattatgtttaattttgttaaataaacatttaacaaataaaaaatacaattttgtgaagaactcacacatatattctaaacatattggattttagatcaacactaatataaattacaaatccggaatctatatcataaattgtgaaaacaaaaagtaatataaaagttgcgtaatggctttttgttgatggatgacttagaccaaaggtcaaagtgggaagttggcgatacacaaggatgcaacgggcgcctcttgacccacgccattggacgtatgcggctctttaggacctaccctaggaacgtgtaaattttattttatttttctctaatcattatttgtgtttctctttataatattatgtcgacagaaagtgacgaaacttgaactatctttagcaattagcacgtcgtttcttctcctaatctttagaaactaaaccaccgagtaattgttgaattcggaggtctcataaatcatcttaaccacgaaatgaaaacgttttgctacctgattattcatctaaaaccagtgatgaatgtgttatacaatttttcatgtttacacattttaaaaactgacccgctatgtttttcattcaaagtatccatcaaatatttacttttgcatgttttttgacaagtaagtttgctatattacgagtgttaaaaatataacaaaaaaaatagtaaaaagttattaatcttgaaagttagctttgtatgatgaccctgctaatttttttatcaagtttaattctttcagctaattgattatttgactattccattatttactattcggttgatatttcagttaagtcgataattttggacacaaattattattagggactaaataaaaactagaaaacctaataggaaaaggaaatacttttaaatgggaaaacataaataaaacttaatgttaattaatctttctttttaattaacctctttgtccttatataagaaagtgaaaacgtgaaagcttttataaccctaatatctgatttcttttagatcaagtaaaaacaatggtgagattggatcttccatgggatttggtagatgaaatactctctcgacttcccgcaacatctctaggtcgactacgatttacatgcaaacgatggaatgctttattcaaagatccggaattcatcacaaagcaatttcataaagcagcaaagcaagatttggttctcatgttgagtaattttggggtttactcgatgagtaccaatctcaaagaaattcccaacaacattgaaatagcgcaagtttttcattgcaacggcttattgttatgttccacggaagagggtaacaagactaaactcgtggttgtgaatccgtgtactggtcagaccaggtggatcgaaccaagaactgattacaattataatcatgatatcgctctaggttacggaaacaacagcaccaagaaatcgtacgacagctacaaaatcttgaggattacgtatggttgcaaactcgttgaaatctttgagctaaagtctaattcatggagggttctttctaaagtccatcccaacgtggaaaaacactattatggaggcgtgtctttcaagggaaatacctactggctttcgtatacgaaattcaatatattgagttttgatttcacaacagagacatttagaagtgtgcctcttccgtttctgtatcaggatggtttcgttactttagctctatcagttgttagagaagagcaacttctgttgttacgttcgaggtttgatatgggacaggttgggatatggatgtgtaataagattgatactgaaactgtgttgtcgtggagcaaatcctttacattggaatttgattctctgcgtgatcttcctgttatgagtattctgagaatcttcattgaagaagacaagaaagtgattgttgtggattgtgatgacagatggaaggagaacatgatatacattgttggaaagaatggattcaaaaagttaagttatgagaaagaccgatctaatctttggcgtctgccgtttttctttagttatgttccgagtttagttggtttatatccaccaatgtaatgcttgtagcttttaaggatgcataaaacgttatcttaagcctttaacattatgaaagcttcaatttttgtatttttcttgagtcaatagaatttgtaaaagaagagattgtcagaaattttaaggtttgaaagacaaaatttcaaactgatgaaatcaaaatcatattttaggagataaagaaaaaatatgataattaaaacgaatattgcataatatattgtcaacaaaaaacaactgctaatataaatccaaaccatatcccaacaagcacagatctctgaaacaaaaacagaatgcaaaattctgagatggaagaaggataagaagagagagctcaaaagattctttgtggtggtcccatggtgctcttcaagtacaaacaccttacctgcatcaagatccaaatcaaaattagtacactagagagagatttagaaagaaattagacacaatcataggaacaaaacagaatcatacgttttgccaattcttcttcaagagcgagacgaggaagttaacactcatctgcacattctggaagagctgcttctcttccatggaaaggttaccaacagcaacacccatacacagaactttcttcaactggaacttcactgttgctttggtctcattcacctttgcttccaatgactcttggtgactcacaagtgttgggaactttcctgttcatcaatcaaacaagtagaaacctcagacatagagcttgaaaacgaaactaaatgatgaccatataatataccaagtatcaaagttattgaagaaactcgcctgccttgttaagaccaggaccaagaagacgaggaatctgcttaatgacagactcagaagccaagaaagcatggtaagacttagcaagcttcttaacaagcttcttgttcttgttaagctttttcaaagcctcaacatccatgttactaagtcccattttctctgcctatcaaaacaaacatcaaacactttgtgtcaatcaccaattcaaaccaaacaagatacacaaaaagtatagagatttcaatcacctcctcaacatgctgagcatctccaagcatacagatcttcatttttgggcgaggaatatgtgggagcttcacagatccactgaaacgcttatccttttgtgggtcatagttcttcagaccaatctgaagctccactgtctcaacaaagttacgcttcttctcctcagattttcccttgatagtcgttatggcttctctaacagcctcactctgaagcttactatataacaaaaacaaacccatttcaccaaatcaggtaaagcaatctactttaccattcatttgaaatgatatgattctgttgagcaattactctccaagctatcaatctaaaggcaacactaattctaaagcaagtgaacatagatcaatatggagattgaaagaagcgtaaaggaatgatttttttcacagtacctcatattgagtgtcttctcaggtcacgaatctctgatcctgaaaacaataagagatcgattagaaaaagaaaaaaaaaaacctcattttcgattgtgacatagaattcagattaagcaggagaaatcgaaaaacttcatggaattacgatgaacgaagaagacgaaatgagaagtgacgatgtttgtggagagagacaaacctgaatggtgaagaaagcggaagccctagttatgtttcagaggcggctgaagattttatatcaaggaagaagaaaaatggaaggaagagactaaaaccctaggggaattgatttcgtttcatgggcttttgttatattagtgggccgcttgtgatcattactaaaaaagcccatcttctacattgtggtattttgaaaaggtttatttaagtatgttaagaggtttttttttttttttttttttttttttttttttgggaattagtgtgtgttcggattggactaatcttaagcaaagtaaacacagttgtgtttgttaaaatccaaattataggccatttcgcattagttttaatccaacaaagacatgaacttagctcatattgaaactcttgacttgacgtatttacatagatgagatttgatttgatcaattctatataactttcgaaagacaataccctagttggatagaaaaatcaccacataagcgctttgaaaactgtgattgcagagaagtatatgataaagttattcaataatataggactaattaaagagatgaaaaagacccattagtttcaagctcccgtacgtataaaccaaagaaacaacatttaagaatcattccaacgtaatggacacacaaattattctggcttcttctctttagatttttcattgatacttgcaatggcttctctaagagcctcactttgaagcttcactgtcttcccaacgttacgtttcttctcctcagattttccctcaatagttgcaatggcttctctaagagactcactctcaagttgtctatataaccaacaaacccatttcactaagtaaattagatctagcaataatccattggacaatatatgatacatctatgtacgacaatcttagcataggaatcaaaaactagaacaatagcaataagagatatcttaatgaaagacctttcaagtacctcattttgagtttcctctcctccgatgggcgagtgatatttgcaatggcttctctaagagtatcactattaagcttactataaaacgaacaaacccatttctcaattgttagatacattgagcaataagactatatcaatagagagatctatatgaaaattggtagaagagtaaaggaagaatttttcaagtacctcatcttgattcttgagtttcttctctattcacgaaagataacaacaataagacgaaacgagaagtgatgatgtggagacagacgaatgtgatatagaaataatagaatgatcaagaagatgcaccaatcaatgtgaagatattctatatttattattgagatatgtaaagatttgtagccatcttcgtttaggaaaccatttcactatgtaagtaataacccaactgcggctagctctttaaatctccaagccttgattccaaaatctcgattctaactttatcatttgccatatctataatatttacaataaaaagtatcacaccgtagatcttgctttccatttaaattccccaaaggcccaaagtactactataaaatttagtttatcttttcttttcaaagatatcttacatttatttacattgaatagttttttctatcttttcaaattttattatgtagacatatgtcaaaatataataaattagttaatacatgtcaaaatcttataaattcttatcacatagtatatcactcttgaatgttatatttacataagatttccatttacgctcaagctttgttgtcattattccaaacttcttagttttattataaatactttctcattttcaaaattgtttttgttatttttgttatattacaaatttattaagaaataatcttacatagttttttttgtgtgtggtaaatttgatattaattagatatttttctaataatataaattatttaagatttaactttgttttacttttgtttgtgtacagaagttttttggattaaacttgtaactttatttttggtcttataaattactattttgttttacaaactcattacatataagatcataattagttatcattacactgtgtaattgtgtcatgatccaatgcatgcaatttttattaatgagctcatgcaaaatccataactagatcgttatctcccattatttaaagttatcacaatatagataaaaaataaaccgaccattgtttaacttctcagaatatttaaggtttgctcgttgatgcttctctccaaactacaagtagttgtatcattcttagagttaattggtcataaaagccgagatctcaaacacatcatttaacaattctaacatttttttctatcgtgtaggctctaacgtaatttcagcacattacgtcaagaaaaaatccattgttctaacgaactgcaacatttgttgaaaggctaagcaagatctccaagaaaaatataatgggaaatttgtgtggaaagctgaaaaatgtaagaagacaacgttcgacatatgacaaaagcatgttccgatatgattatttgagctactctctgaattttgatgatggaagacgagaagataatgagaaaatttccgtgcctattggacttcctcaatcgcaaaatctcgaggagagataaaagagagtttgattcatgtatttattttattagtataagtgtataacataatatttaactatgtacattaaaacatattaacgttagataatgaaaatgaaattgtaattaaattggcagtaaaaatttgtcgttgcttttatcaacaagcaaatgctcctgttttataaactctaactacgaaatattttctttataagtctcacaacaagtatccttgactttttttctcatatgatcgctctttttcatcattcagatcgagggatctttgatcagttgacaatgcatctataagttgatatcagtaaagcgtttctcgttgggttttgatgttctactaacaaaaatcacgcttctttttttatttgtgaataggttagcttgctaaacaagtagattgaaaatggaaaactaactaaaggtgatataaattaaaccttggttaagttacttttgggactatacagttcattgggaaatagacaatgaataaatcaaccaagattgtgcctcatttcagccatacaaacattttgtctattttttgctaaatcggtaaatatcatataaaatgaaagagttaggaattacactgagaactcctaaataattagttccttggcaaaaattatgataaaaaacaaggaagtaaacaaacttcagaaagaaacactatatgagccaaaaactcataagattacggaacttctttttgtgtcttcttgcgttgatggagttaatgattttcctatcgatgatcttgaagactgaagcatgatccatctgatgcgagttatgtagcatgttatttctctgcttccaagttacgtagacgacggaatgaacaacaagcttcctcagtgtggagggagcagaagtgctagaacgacgaatccatgaaagaagttcagcccaatttcagaaaaataagtgagtgcaacctaagcctggactgaaccgaactccagagggctttgctgaaactgcaacccaacattttgtctatttgtgctcaaagaagaaatttctattcgacaatcacaatcccagtcgcagttcaagctgtcattttatctaatagtcactagaccacaagctaccacttggttaaacaactaagagcatcattattagttgtctcctagattagttcttatgataagaacatctcattttaactcttatataagagacaaaatgacaaaatgtctcttatataagagttgaaatgagatgttcttagtaatcaataacaagaaaaaacctaagaactaatctaagaaacaaccaataatgatgctctaatgtttcaatccaagttggctaagttggagtttcctcggttctccagcggagatccagcggcttggttaagtaaagtcctacaatttttctcttaccaagactccaagagtcgcctgaggatcaccggatacagatcgcatactattagactgtgggcttccaacctaaaaccaattggcaataggtggagaggcctatatcttatatatatcacttaagatcgtactcaacttccgatgtgggacattgtccctaatacgccccctcgagatgatggctcttctagccattgatctcgatatgtttgggcatggattggcgggccaagtattgggccggaccgatgtggatcgggttgagtatgtgcgaatcgggctctgataccatattagactgtgggcttccaacctaaaaccaattggcaataggtggagaggcccatatcttatatatatcacttaagatcctactcaacttccgatgtgggacattgtccctaatacataccacttgaaggaagatgctattgaatggtgacaatccatttagcaagacgtacgtcgtcgttaaaggtgacgttgtttcacgtgggccatgttcgaaaaatagatgtgggctcagtttggaccaaagaattgtaaggacttgatgaggccgttactaagatttaacagacgggtaccttatgagagtagacccaagagactttgaaaagttacataacaaagtggtcttaaaatctgatttgattggggcatagcatacgtcggagggttgcaacccaagatcgttgaagatattgcctgttagcaatcattgatataaaaaacaattcctcaaatgataagacatatttctttgatattttatttatttcagatttcaaaggcttgaagtaaattagtaattggtattttccttttttcctaacatatgtaaaaattaagaaatgagttatacctcattatgagttagtacatattttcattatagataaaaaagaaaataaaaagagaacaaatatgttgatggttaagaatgagatcaaagcgagaaatagtacatcttcgaagaagaaacatgtatttaaaccaaaagaaccatgtagtgaaaaataattctattgttctcaatttatgaaacccgttagaagaatttcatattaagtttgatcatacatatgtaatgcgtgaagatatactatatatgatccaatttttacgacaaaagattatatttctttgtgtatctcataaataaaaactaagttataaaatcaatattttatgaaagaaaatcattaaaacaaaggataatatcactatctatacccagaagaatcaaaaattaagaatatactaatgttttctatataattagttctctctctataatttatgtaagttagacaaaaatgtccttattgcatatatcaaattgtttagcaatgtaataaaatagttatcaatatttttatcatcaatttcttcacgaataatatattatgattagatgattatctattagactaacgtgataataatatttatatgcatgtaagtaaaaaaaaaattatgttaaaacatatgatatctgttaagaaaatatacaattagtaatgtgttaaatttatttttaacatacgaaattatacaatatatcatataaacttgtcaatatattttaatctttcattcatcatgacataaaagtacggtaaaaataattgtaatgtactaatgtttcatttagcaaagtatctaacgtaataatataacaaaaagagtctaatccctttttcttgtgctgaatatacataaataaaaaatacagatttataattttaaatcgataaatattttttaacaaagaatttgtaaacttatcgcgatatcatagtttttagcacgttaaacaaatagttatatacttatcatcaatatattacaattatttttatttaatggcatttttgtaattattttttttttaaaagatatttttggtttatatattatttcttcttcatacttacctaaataactaatatttatgcatagattcttaatttcttcatcttctatgcatagatattaatataaccctaaaacaaaagaagaaaatgtgatctactatagaaactttcactaattttcaaccgagtaaatcaacatttaagtaaacataatcttatcgtcaattggctgtattcaaagtccattgaattccatgaattaactatttccaaaattgcatttaattatacttttgtacgtggaaaaactaaatgataatctctgttttttatggacggtctctagaccaatcaagtcggtgcgaaaacatgtcagaaatgcctaaatgcgttatgtctatatgtatgtgtaaatgcatttagtttcaaaacatttttctggtatacactgaaatttctaagttcaacaaagtttgcaataaactatagctgtcttaatatataagtcacgaataacggctctaattaaacgatgtaactgacgagctttaatttcgattgtttttttacttttcagtttcaaggaacaaatgaaaggttggtttcctctacctgagaagaaaagttctatcacaggacttgcgaataagaccgtatatatgattgacatgttgtgcttttaatattaatgttagtgtcacagattgttgtgggagcatatgctaaagtataaaaaaataataattaaaaatattatcacgatcacatgcaaagtacacttgaaacgtgtaatctgaagacagttaggttggaatcagggtttctataagaggaaacccagatcttgtttttctacctcatagtttttttttatggaaaaggaaagaaattacatataaataattcaaaagtggcagaggaaatgaatctctttgtcaagttgatgtgacctttcacaatttgtcaaactgtcagcttttgaatgtgttggaaacgcattggggttgtgggtcgccaacattaacatttccaaaaatggtaagtccaagaataatattagttgttttgggatatattctttgcaatacatccacacacctaacagagaatatatttcttttcctcatactccaatattattactttttaagaaaataattaagtttcatattacccttattgcaaaagcgacgtttagaattttaaacagaataatgacacttgaaatttgtatctttctttctttaacattaaaaaacaagggggcgataaaagcaaccaaagctgtgattcatggtcgacactaacacatggaataaaaaaaggttatctcttttttccaacatttctctggtgactaagttaattgaataaattgtatgcatatatttatatgttctatatatatactgtccaaaaaggaattgaggaatttttaacttttaaggaccatattggaaaatctgccacttctcatccactcataggttcgaaattggtttattataattttaacgcacaaattcccttgttagtgctaaagaaggatacctacaaaaattcatatcgaattctagacgaagagacctatattgtagagctgaaaactgatgttttacaaaaactgatattttttcgggaatgatttggtttaagcaagaaatatcttagtttgcattattcctaagctggtactagaaaacaactatcgataaaacgaggttgtcttccctttggccacctattgacataagaaaacaagacacctatcttttttctctagcaaagatactcctagagtcctagtcctacgacgaatggcgatgctttcttaaataaatataaaatattagttctctacttctcctaacgtactagaagtagaaattctgctgaaaaaagaaaaagaaaaagctaaattcccgacgccaccatttataatgcgttcattctgtttaaataatggctagagaagaacatggccgtaaatccgtaataacacttccaggttctttcattctaacataaatttatgtataaaataaagtttttaatctatccacctgactaattaaatttttattttcataaaggaaagagttttcctataaaacaactataaaaaaaataatagtatcagatttgaaatgacgacttcagtgacgataattttactgaattaccatcacgcccattattatgttttattttataaagcaatcttttattgtgtcctaacaaaaaagctaacttctaaattcttactagggttcaaagacatatttttttatcgaatcatgtcgtatgtatacaaaaataatttattttggccaatacaacagatagttgattagtgttcagaaatacccaactctccaaaaaaaactactctcatttttttgtgtaaggtatgatcctagattaaagaaacgtctttttttttattctctctgaagcatcttattgacaagaaaataaataaattccttggatctaaacgtcaaatcaaatgcattacagccatttcttctcttaaaccctataaatatacatgttcttctcactttatgcttcatcaaatcaacacaaacatatcccccaaagcagaactaaagcaagcccaagcttgtctctccccattccaacacacacattttcatatcaaactcaaaacactatttccttaatttctttcacttattcttcatttcttcgtctaaattcttaaccaagcaatcgagatggccaggatttcctcagacccgcttatggttgggagagtgatcggagacgttgtggacaattgtttgcaggcagtgaaaatgacggtgacctataattctgacaagcaagtctacaatggccatgaacttttcccttctgtagttacatacaaacctaaggttgaagttcatgggggtgacatgagatcattcttcactttggtacgcattgctttattgacctatatcgtcatataaatcatatatatagtaaatgcataaataacttagctaggtgatttttatttttcgttaaatgtctttttcttcccgtctttatgccataaatagaaacttttttcctctctaactgttagacttatttgaatatttctgtaaaacacacaaaaataagattttaattatttatattatctactatgcagttatatatatataatattaatttgcagaacgaactagtttgtgtcagatatacatacgtgttatataatgtttatctgtgtatattggatgtgtcacgtgtattcacatatatcgaatatttcaaacaggttatgactgatcctgatgttcctggacctagtgatccttatctgagagagcacttgcactggtaaattttgttccattcaaattttgttaagttagagatttaccaaagaagcaaataaaaaatgttaagagacatataataaaaatacataacattttcttgcaatgactaatctcaggattgttaccgatatcccggggacgactgatgtatcatttggtaagtcctatacatatatccttagatataacaaatcacatttcatatacgtatattttctgttcaaagattttaatatgagaatacaaaacaggtaaagagataatcgggtacgagatgcctcggccaaacatagggatccaccgctttgtgtatttgttgttcaagcagacccgtagaggaagtgtggtgtctgtgccatcttacagagaccaattcaacactcgagagtttgctcatgagaacgatcttggcctccccgtcgcggctgttttcttcaactgccagcgtgagaccgccgctagacgccgttgaatgactttccaccgctgccgcagctgccctaactaactctggctgtgcccggacaatatgtgttgttccatgcattctatattttagttacgggaaacagcttttcctatcatatttatgtgtgtatttgttatgaactgtttgtgatctgaataaacttggcttataatctcatgcatggtctattttcatattgatggatgttaatttttagtattatcaatgtaattatacctgatattccttattttcaaaattatgatatagttgtataatggtagtcgtccttaagtaattggtggctgcaagcaccaaaaatttgtttggacaaattaccatgatcgccgtctgtggggatcgaacccacggccacgtggttaaaagccacgcgctctaccactgagctaagacggctttgattactttcataaagttatcgaaaatcaatcctataaactcattattttattcatgttttgatatacttttacttaacgcagaaaagatactataagtcaataacgcaaagttaaatacgaattttctacaactaaatcgtaactacgacaacaaatcctagcaaccataagtccataacgattgacaaataaacaaacaagtgtcgattgaaaacgttaacaattgacaaataaacaaacaagtgttgattgaaaacgttgcgtattgcaacaacacaatcataatgatgatttacaaagtgttgttcgctttagaaccaaagctcccgtttcagatgctgaaggctcgttgagacctcttatctcattccgcttctgtcctaaaccacaatttttggtaatggatgataaaaaaatggcggtcaacttgagaaacgatgacttaagcgaagaaacaaagactctcatctcttcactaccttcagacaaagattccactgggataaatgtttgtaagtaccaaggatgttggtatactcaccactttctccaagctgtcctcaatttccagaaaaacttcaagcctcaagacaccaatatcatcgttgcttcgttccctaaatgcggcacgacttggctcaaggcacttacattctcactagtgcatagatcaaaacacccttctcatgatcatcatcatccccttctttctaacaatccgcacgttcttgtcccctaacttaaaatgaatctcaattactatagcgaaaaaccggacctgaccaagttctcatcgtctccgaggctgttctcgacacacatgccgtctcatacgctgcaagaagtgcttaaagattctacttgtaaagttgtgtatatttgcaggaacatgaaagacacattggtttaatattggcatttcttttctaatgatgataacgtaaaaaccagtttcgaggaaacgttcgagtctttttgtaagggagtcaacttttttgggcctttttgggaccaagtcttaagctactggagaagaagcttggaagatccaaatcatgtccttttcatgaggtttgaggagatgaaagcagaacctcatgagcagatcaagagacttgctgagttcttagattctcctttactaaggaagaagaagagaacggattggtggatgagattatagatctttgctctctacgtaatctaagcagtttggagatcaataagaccggaaaattatgtgaaggtagagataacaaaacatttttccgtaaaggagaagtcggtgattggaagaactatttgactcctgaaatggagaacaaaatcgacatgatcatccaagagaaacttcaaaattctggtttgaaattctgagtttgtgcttttctccaatgcattgtaataagactaccctatgttgttgtcatgcttttctctgttctacatattggctaatggctaatgtaatgacgaaccaatcaaccaaatccaaattctacacattgataatacgacttaagccttctacaagatcatcaaacggaacaatcaaatcaataataagcaaatttaataaccaaactgaagaaatcatcaaataaagcttaaatttacattgacatgtttgtttcttgctctttcttcttcatgtgtgtttcattcaaacgcacaaaaccaaagcaacaacaacaaacaacaaacaacaaagtcaaatcttctcaagcttatcagctttcacaatcggattcgctttagcgatcttatccttccccatccgcttgaaatcaaacgaacattcatgttgctccgcgtacctatgcgtcccgcagaaaacgaaaccacacctacaccgaaaccccgtgattcccacgcgccgccgacaagtcaaacaccgcttcggatcttgcggcggaccatccgcctcctccggttcagccgccgctcgtttctctgatttcgcttcaacgatttctttcgaatcagctggaggcggaggcggtggcgacacggaggaagacgcagcagcgccaacggcggctaaggattgggtaagagcatgtttggcggtggaagagttttgttcttgatgttgaagatctcgaaaacatttggaacagagattttgtgtagctgtgcttccgaagaagccacaattgttagcacataatcgtggttcttgaagtctgtgttcttccgccataacagaatggatcaaaacaaactccggcgaaaaaaatctacaaaattaaccgatcgatggaatcaaaaatcaatagatctgttgcttaaatctcatcaaaactatagaacagaaagaaaaaactaatggatcggcgaaaacaacaagtcattacctggtgaaaaaaacgatttattagatctgttcgaatcggtgatggttctaagaagagagaatctgtatttttataagaagagagaaatcaatggaatatggaaagaaagaaaggaatcgagagatgagaaaggaaagagatgaagaattatgaggaaatgggaaaactaacgacgacgcaatcgatacaaaattaaattgttattttactcttttttttgttggccgtaagatggaaattggacaatttgtggaaaatggtgttatttggcttttgggctagcgttgaagattccagaagcacctacactattcattttaacaattttgtgcttgataattgaaatcatgagacgacaaaaaaataatattgaaatcatgaaactaaaccagtgcgtgtcagaaataaatactagatgtaaaatcgacaaaggatctgagttaaagggctagtgtcttttgatcaaaagatagaaagcataactagaggctgaccgcaacaatgtaagcattccaagaatcacactgttgaaagctcttgacttgttcgtacttgatatcacgtccagcaccaaacccatctgttctacgcatttcagaagcgtccggcatttctctgagccagaaatggactgagctaaacccagcttcctccatacaatcctttatctccggcaatgaccacctacacatatatgaacagcagatccaggagttacttctcaggaacttaatgattcaagagtgcaagtacaataaatctacagacaataaggaaagcaggaatattgtcttgcccgaatataacattcaatatcatttcactgctacttaccagccaacacaaggataagtcactaacatatgaatttagatatcagtaacattcgagcacatgtttgtgtaagttttgatccatagtggctgcactacagaatctctacctcacccagccaaccaaaattaccaaaagcctacacttatcaagttatctaaaatgctaagcaaacccctaagtaccaaatatgcttcgtttttttgtaactgtaatattttcttaaggcttgtgggagattgtgggtaatgactgtcccactttgaagaaagaatggatgtggaagtagactacaggacacttacagtctccagctatatgaaaaagcatggcgaatctttctgttctgcttctgaaggtgatagtgcagactgatccttgtcttgcggcttaaaatatcaaactcagcctgctcccatgtatactgccaaatgaatatggacaatcgttagtacggttatctctagtaagttcgatatttatggctctgacacccttttttaccgaatgaagtacaagaatgaactattaccgtgaaattagggaatttccgttgaagcttcaactgtccctcagcagaagcacctccatataaatccatcacgaagataccacctttcttagacaaagcgtcacgtgcattcttgaagtaagaaaccaactccgagcgtttgtggagacaacaacaactaaaattaaaagcacacacaatatccctctttggcaacgaatcaggtccatctttctctaaagattcgacaacactcggatcagccaaatcttcattatcatcaccatcatccaagctgatattttgtatcagctcatgggatttagatttcacttgcttagcctcaagaggagttaaaacattcccatggaaaagcgacattcttgaatacacgtcagaaccaagtttactaatgttgttatccatacaccattctaacgcctcaagatcaaaatcaagccctatagcagtccgtctagtgtcagtcttcagccactccgcactattccaacaatcaatgtaaaaacttattcaagcaagaaaaccaaaagctacattattttgtaccatttagtgaaacacacaacaaccttaaaagagcagtgccgcagaaatcttcttggaaatggaaaggttgtcttccaccaacatacattaaaaagaacttctgcaagtaacttatgtctccttttggtgactgcaacaaacaaaaagcaatgaaaagacaagaacaacaaatgttaaagcttagtgcttgatgatagaacaagaacagtgaaacacaaacaatacaatttgttaaatcttagtgcttctttatacaagagatacagagaactctctccctaagaaaatttaagtacttttaactgatttcataaaaccagtaagaaccactcaatgaaacttagaaggccaagcacagaattgcagttacctgaacggattgttggtaaaggagaaactttgaaggcaaatccgatgattcgtttccatcattttcttcttcttcttcgtcagagttttcttcatcttcttcgtcgacggaggcaacagccggcgggtgttgatcgtagaaatcttcagcatcattcgaatattcacctttgtggcgacgtcgattaggttttttctctcgtttccccatttgtcgtcgttctcagtccaaattctcaatccagagaatagagcagagcagagcagtcgaggaagaagagaaaagcgttgactttgtgtttagtgtgtctttagactgaagagtgccctaaactatgccacgtaggccctattgctctcggtttagtgttttttttgggtcaaataccggtttttagtggttcggatggtatttatcatgtggggttttttttttttttttttttactatggtttagaaaaacttggttaattatcacctaaaatagtgttttggtgtttcgttggagatgactagacgcataggtaacaaatagtactttgaaaatctcaatagatcttgcaatgatctcctcttattataagtttatgatggataatgtatttcttacttgaagatatgtgtttcttgccaataactattgattatcttgtgtttaagacaataatatattaccatttttgtattgcctaatcgcttccacactaatgaacatattctttgaacttgaaaatttccttttttctttaatgcattgtcaactagtgaaaaattcattcgttcgttttatcattgagacataatcaataatcttgctagttgggtatcaatagaacctgttcgctttggttgacaattacgattcgctgctgaaactccggtctttgcgtttgcaatgtgcacaagtgactccaaatgttttgaatgaataaaaggaatgtcctttctgcaacttaaatgttctttgttgcaagtttaattttggtcactattttttgctacaattgcattcaaagtagatttactaatttgtgttgatgttaaggtttgtttttgaaataatatttctagtttgttttcttaaggttgataacaagaaaacttatcatggtcatgctttatattgtcactatttgaattttttttcaaatttgcctcctattagaaggaccttgtacttaatatatttgaatggtgggattttgatgtatctctctacgtggatttttttgtttttcttctgctttttaatacaatttgttttctttttcaaaccatttaatacaaaattattggaaaaaataagcatatattaaaaaacggcaagcgttttcgttatcattcatcaaaacattgagccaattcttcacaacttccaaaaacgcctcaccgtttcattcttctaccaacctacgctccgctgttttcaagaccttttcgtcttcgtcgtcaaatctagcttttttcttcatcgctttgcataatccattccttcttctctcttctccatctccttcctccgatcttcgtctccaattcggaatcttcctatcacaatttcaaggctcctttaacccttgatcatcaccgattcaatcaattcggaatcacaatttcaaatcgagagaatttcaatttctcttgtaaaaccctaaattatgtacagcaatttcaaggaacaagcgatcgagtacgtgaagcaagcggttcatgaagacaatgctgggaattacaataaagctttccctctatacatgaacgcgcttgagtacttcaaaactcatctcaagtatgagaagaaccctaagatcagagaagctattacccagaaattcaccgagtatctccgtcgtgctgaggagatccgtgctgttctcgatgaaggtggatcgggtccaggatctaacggtgatgcagccgtcgcaacgaggcccaaaactaagcctaaagatggagaaggtggtggtaaagatggagaagatcctgaacaatcaaagcttcgagctgggttaaactctgcgattgttagagagaaacctaatatcaagtggtcagatgttgctgggcttgaaagtgctaaacaagctctgcaggaagctgtgattttgcctgtcaagtttccacagttcttcactggtaaatttgtgtaatctggagctattcattgaagttttgaaaccgttctctttgtaaagttgtgagctttatctgttgttttgttacttcttaggaaagagacggccttggagagcttttctgttgtatgggcctcctggaacaggaaaatcgtatttggctaaggctgttgccactgaagctgactctaccttttttaggtaacgtatgtttaaaagtgtttgaatttctgaaagtatataggaagaggatggtgtagtgtcttaactctttcattatagcttgagaccatagtcaaatacttatggatttgaatagttgctatggatgataagcgtattgaagtagtttgggattagtttaaggagggtggtctttggttttgtttgtgtttgaattctaacggtgtactacaagttcggatagaaatattaaggaaaggtttgatgttcctttatagtttatatgcaaattctgctctatgctagaatagatgtatgagtctctgctatctgtacatgttatacataagcagctgcaacccgattttaaaggcctggtagaatctaaatagcatattagagaaccaaggcggatcgatttaattaggcaagaatgctgatcctttggtttaagggtgccagaatttctaatttcaatgttgtttgcacgaggtacttgggtttttaattaggtatggctatgtactttatgttggttgtttttctatgtcagtttgtttttacagtgtttatacttggaaacatgttatagcttaagaaaagttgtttcctttttacttcccaaccttcagcgtgtcttcatcagaccttgtctcgaagtggatgggtgaaagtgagaagctagtatcaaaccttttcgagatggcccgtgaaagtgctccctcgattatttttgttgatgagatagattctttgtgtggtacacgtggagaaggaaacgagagtgaagcttcaagacgtatcaaaacagagcttctagtgcagatgcaggtgcatagcttatccgaactaaactccatgtcttttagttgtagctgaaatttccgtctctgacttatctctttttcttttagggtgttggacacaatgatgagaaagtacttgtacttgcagcaaccaatacaccctatgctcttgatcaggtgaaagtcataagacggcttggttctctattttctttgccagttaaatattgttttgttaactccatgttaatttcaggctatccggcgacgttttgacaagcgtatctatattcctctcccagaggccaaggctcggcagcacatgttcaaagtattattcatttgcttcaagtttctcaagtaaaaatcattcaagggagacagaaccagtttactaatgagatctgttttgtaaatgcaggtccacttgggagatacacctcataatttaactgaacctgattttgaatatttaggccaaaagacagaagggttttctggttcagatgtgtctgtttgtgtacgtaacttggcctgagttatttcttattgtccttaatttccccctatgttgctatagatagataagcctttgtcttgagaatctttttggctcttgcaggtaaaagatgttctgtttgaacctgttcgtaaaacacaagatgcaatgttctttttcaagtctcctgatggtacatggatgccatgtgggcctaggcaccctggtgccatccagactacaatgcaagatctagcaacaaaagggcttgccgaaaaggtacgcatctaaactttgaatatatcatttaggttttgtatttcaagcttctctgatttctaaatcctttcaatccttacatatgacgatttctaaagactgaattgtgtatttcatgtgaataaattgcaacagattattccaccaccaatcaccagaacagatttcgagaaggtacttgcaagacaaaggccaacagtgagcaagtctgaccttgatgtccacgagagattcacacaggagtttggagaagaaggttgatagatttgacattcccatcaagcatctttcacaatcatattattattagtctcttcaccatctccttatgtatgtactgagaagcaaaacaaaatctcaaacccatgtttgatttcttcccaaaacattgaatttgctttatttctcgaattgtgtaaaaaaaaaatgttctgaacaatgttttctatttattatgtcaccaaaagtctccacatgagcaaactccatcactgctaaagtgatgaaaccgatttgaatctctaactacgatctctctttcttcaatctttgcaattaatttgatcactaaatgacaatctccacaaaccctaaggttcttaatgatcaaaagagggcttccctttggtgtagctatcaacccgaaagcaatagctaatctctcactatgctgagcaagaactgcttctttatgctcatcatcaatatcttgaagcacataacttgtatctggctcataccctaaatccttcagccgtgtacttaaatcttctagcttcatatagatttgatctttgagaggatgagaccgatcacccgccaagaacgagtaagtcttgttcttgacctcaatccaactataaccaggttctttcttcacgttcctctcattcatcagcttccttactttggctctctcttgccaatctcctgactctgcatacatgttagacaataatacatatgccgctgaatcttctggcttcatcgcaatgatcttctctgcagctaatctccctagctctgttttcttgtgcacacggcatgcagctagaattgttctccaaatggtggaaccagccggatttggcatgttttctatgaccttcatagccttttcaagttgcccagctcggctgtatagatccaccatacaactattatgctcctttgtaggtgctatcttgcagtctctcaccattatatcgaaatatttttcgccttcttctactaaccccgcatgtgtacaagcagcaaatactccgatgaatgttacaccatccattttcacctttctcttcttcatctccttgaaaacatcgagagccttcatagcttgcccgtgttgtgcatacccagagatcatcgaattccatgatactagatctttctctctctgccttttaaagacttcttccgcactctcgatgttgcctttctttgcatacatggttagaagagcactactaacacacagagaactatcgagtcttgattttatagcgaacccgtggaattgctttccctgtcccatagacgcattagtagccgcacacacgttaaggatgctagagaatgtgaactcgttcggttttatccctccttttgttagctcaccaaacatctttatagctgcctctgtctctccggtctgagcatatcctgcaagcatcgctgaccaagccacaatgtctttatcatcaataccgctaaaaacttttgcagcctcttctactttgcctaacttcacataagcatctaaaagagcagttccaacagttgaagatctctcgtagttagtctttacaacctgtgcgtggacctctgatggagaaatcacaggaagagctgtgagaatgacagaataagtgaattc

SEQ ID NO: 294 - DNA, 118196 bp, Arabidopsis thaliana
gaattcctggcaaacgcccaacaacagtgaatccagcttatgaagagttcttcctaaccaaaccttgaaaagagtatgagaagctcaaccgactgacgatagaaaattatgaagacaatggttggtcatgaataagctataactacctcaacaccacgggtcatctcttgggctgctgagaactcagatagactgtcaagcagctgcaaatactctgataggacttgaaatgcctgcataataaggaataaattcccatctcttgttagtttcataacataacatcaccataattcatataagaaaaccatggaagtatacaacagagacgatggtaaactaccaaccttgcaatagtttccatcttcaacaaggtcttcaagatttgactgcattactcttgcatggcggaggtcagttagtataggaagcatatcctgcaagtaaaaagattaaactttcatgtcgctcttattacatggtatccagagaagcaaacaggcatgctaggaataataatctcaacagtatgtttagcaattaaaacaaaaaattaggctaggttacacttagattgtatctaagaaactacttgctagaaacatcctgttcgtaactttagagattaaaacaaaaaagatactcggccactttctgatagatgataatacagagtaattttgtacacaaagttctagagcacattgatggtgatttcagaaggaaactataacacatgaaatatttcaagaaagcagattaaagaaacaatcagtggagcctagatgtctgaaataaattgagaagcctaccagaagagcttgtttctttttggaatgagtgtgtacaataagatctcttgaagcctcattcatagaagaagtcaaatttcgtcttccattctggcaataaacacacaaaaacagccaaaaccaagtcaaaccagtaatagataaaatagaaaataaaaccactgtattgtttatgtaaaatttaggttaagaatatgaaactcataccttgcagatgacatttgcaatcttcaaatctttctccaattctcttaccaaattcatccccttcactggccaaaagcaaatattaatactcacaaaaccaaacgcatatgatcttctcaattcaagaatacttacccattacttcatgatgctccataacatggtgagacagagtttctgccactttatccagctgtaccaacctcaaggtagcctacacagtaaacaaaacctattaaactcactaactaaaacgttcatcaacattcttaacctttcacaatagacgcatcagtttatattcaattccttgagagaagttaaaagttagtacctgcttctcaaaataagctaactcactttcatcatccggcacattctccaaaatatgccttaccggatcaaaatcctacacaacaacaaaaccaaaatgtcacctgtgggcttagtaatgatatcacaaacaccaaaacaaagcatacacacacacagacctcttcatagaaaccttcttcaagctcttcaacttgttgaggaagaggtctgtttccataaattgagttaagctcagtagcagtagaagatatactcaatctctgatcagaaggaagtcccgccaaagcacgagcaaccgcagcagctgccgcagcacgtgctggaatctacacaaaaaatccaattctctaaaaaactccattgatgttaagaaatcgaacaaaacaagttaaagttgagattttgattacctcaggacgatcggagatagaaggagaaggtaagagaccaagagaagtagcggatttaacagagctgaggaatttttcaccaactttagataaatccatgacaccagtgccttgggataataagaaaggaagtaagaagaaaaccctagagctctcgaaagcagcaccagaaccaagttcgtttagatctccaccgccattgaagagaaatggattacccaaaactgaaccgaatgggaagaagagattaggctgcatctctcatctcttctttataccagtaagatcaattattgatccatctaatttcacgatcggagaaaatgtctgtctgtgtgttatttctttccggcgagtcacaaatcggatcgggaagagagatctagaagaagaagaagacttttgttgagccttttgatttgtttcgacaatggtgtgattaaactcgctctctttggttttgtttttgttttgttttacccaacaaaatgattaaagccagtgtttatttaacactcttcttccaaattttctgtgtagtgttaaatgttttttaaaaccggaccggtgattgaaccgggtaaagctcttgaatcatcaaacctgatttttgtgaaattgatccatccaaaagaacggtataagatcaacctttgcaaatatctcagaattgtcttttttgtttctctttatatgaagaacttgagcaaatgttgttgttgtggaatcaaatctttatcaactaactgattttgttctatggattctcattctctctaaatcactcccaataagactcctttcaaaaacaaccagtttctactgaaaacattactttgattcattgtgaagattacgataaaccatggaaagttgaagcagaggccgacaattaagaggataaaagaaattgtcgaagaaaataaattgtaacaagaaattagcacaaaataccataagtaaaaagaactgagccaaatcatcgtccaaaaaaatcataattaaccctttgtcttttcacaaacgataaaagtagtcatcatctgaaaccaaaacgcataacataagtcctaaggcgcaaaagttggccagatccttcaaaatattaacagccaaacccaaaagagataaccgagagccgaatatagttttcataattattaacggcttttaaaactggcaagagaagaagtgaatcattagcaataaaacataacctccttgacgttatcttttattgctgggagctgcgaaatgacttgacccacacctgttgttgagctcctggacctgctcgaacctccatcagacatctcactctccatgtagtagcgggcacggaatgcagccaagtgagcgtagtaggctggtggcacaattgacacagattttgtacacctcgcatacctgcatatgcattttattatatgttttgttagtttcagagagttaaaacatgtcataaggaaaatgtacaatgttgttgtctcttacgtgtagcagaggttgtttgtgagcatttgcaactgatcagcggtgaaaccgttctcatcgagaagtacatggtaatgtgccggcctgcttgttccctattaccattcaaacattcaaaggaagttgtaattctgctgagacaaaacaggtcataaattggtctagattctggaagcaatacctgaataccagcatggctgttcaaatagaagtcgaattcattagggtgacagattttagtgtccacgacagtacctgataaggaaatacaaatatgttacttgaaatctggatcattaaaggaattaagttgatagagaagagcagagagtgagaaacctggttgaatattgccactcttatcagtcatatcacgattcccgtgttgctcagggaacaaacgtgtgtggtgacgtttctggacaatcacgaaagtaacacgaggaacataattctcttggagagagttacaagccttgcggatagcagtcatctcatgtagcagaacctgactaaactgcccttcgcttactccgtcactgtataaagagaaagcaattagccaaacctgctcatgctatgaaatgtttaagcatggaatgtgagaaccacttaccgatagaagatgatcctttgaggtatctggcctgtagctctcctgaatgctatgaaatgttccctgcaatcacaaacagtgtccattatatttattcttgtgaaaaatcaaagaacacaagaagttgtagatgttttgctcttaccttatcaaaccagagtggactagcccacgttgtggatcctgaaccagcttatacaggtcctgaataatttcttccctatgagcttgagcagaaaccaatcctcggtatttgtttatctcaggccagtccatagaggccacaacctgtagttgaaataagagaattaccttttatgatgaaacagtagtataatgagatacaagtaaaataagatatacatacagcagcaatagaaggacttgagtcctctccaggctgtgggtgagtcacatcagcacccatgatgatggttggacgatcagtaataagaggtatgtttcttctaatagcatcattaagaacagtgttccttcccccagtctgtaatacaaatacccgttttacaccatcataaaaaacaataagaagcacagatgactagaccttgacattgatcttcaaggcaacattttccatgtactgcttgttgagtttattaacttgtctaggttggcaacactgagagacaatccccaattctgtttcacagatcctttttatttttcctgcagacagaaagagtacttcatgaacagattgtcggaataaactttgcaccaaatattaccaatcattagcacagacttaccatatgatccagtcacatcaggcaatattacaatcaacagttggagaccaggtgcccttttgtggatatcgagaagagcttcctcaatatgttcagggggacaagagatgaacggaatagcaggttgaggcttaaattcctggcacaaagaattaaaacaaaaaaaagagttagtaaattttttggtatgaaattgtgacaagtatcaataagcatgagacaagacagaccattcctttgctgacacacatcccaatcaactgtttgcagaactcttggggtaaaccacggtcaatccgagtagagaaacttacgcaagtccaagaagtgacttttgctccattaaccattttctggaccatatcacagccaaaaggaggtaagagccccaaaatttggtaacacacattaaaccacaatagaagcattaaacacaaatcttcatcactaactatttcttccgcatccacacgcaaagcagtaaagtatagtataatttatcattataagagaaatagaagcatatttcttatttagtttcaagtgcctacagagagcaaaaagattatgatagtcaattacagttttaccttgtcaatcatgttccactgtcctagccttggatttaccattttctctttaccactgtcatggtacttcaactgttaacagaaagaacatcgtgatgagcaacattgacaagaaaatgcatgataataaagcaaattaataacaaaaatggagaaagaaaatcaccatcggtgggggaagtacacgagcttcaatcgaggctagttgggtagtcactgacatcccaaactccttgctcagatcatcattgtaattatttttcacaaccaactaataatataaacaacaaacgtgatgttagtcaaaacagaggtgcaaaattaaagactatttttccgatggaggaactactgtatatgtaatgtaaagaggactaaacctacgtttttgatcgagttctctctatcagggggtcgttggcaggtagcttttagcaatgcagtcacttgcttctcattgagccttttggtgtatctttgcccttcgtcaatttggcagagctgcaagaaccaggaataaccagatctttaaggatacaaaatgaatccaagaaaacgatggaggtaaaaaagtagatgttattaaaaatatacctccattggtaggtagacgggtcttgtgtcactccctgtttgaatagcaggtagagcctggtatttcactctataattatatttttcagcaaaatattgaacaaccgtcttctctgatttgtcctccagagtgaacctgaaatgattagaacataggcaacatcagcaaatttataaccaaagatcagaaacctcttccaagaaaagcaagaaaacaaagttcaacgattatgcaccctgctaaagtaagcatcttcaccttagctccctgatgggtagactagaaatcccactaattttggcactttttgtgccgttccagtgaagcaacttaactttcagtgtcctcaaaactttcttcacctaaataccaacatatgattttcaagataagaatcatatataagacatcatcttgaataatattaataattaaaatggtggaatataagtcagatatataccttaagtcgatctgagtctctaagtggcctgtttaagtcccttatattcagaaacttgctaataaagtcagtgacaacaatcggttcataaaatgatcttgctgaaacgtctgcatcataagaaaacaacacggctataatgaatcaaaatcatctgcagttaaaaccataaagtagaattattcaattctaaatcaaataaaaatataagaattaatcaacatcaccaatccagataacattaagcatattcttaccaatgttcagagacaaacccatctgagtcagccttagactttggaaataacctctccagtactcaataccatctccaagctcacccctaccatctcttgcgtcctttcccaaactagtgtggaaaaaagacctcccaacagagacataactgaacagaaagcaaaacagggaaatgttaagtttatgcatagcttttgacaatactgaagtttatgcaaatttcagatttcttactcattagagggcttatccctaagaacaacatcaagcacttggatagtatcatatggagcctctctttgcttacgatcaaggaactgttgcaactgataaagatcagtgcttgtcacattctttacagcaactttaaacggtctgtccttcctgccaaaaggagtcacaatgccaaaaaaaactatgaaaaacaaggcgatacaaacacattcacaaagagttaaaacaagacattacccagaggaaccgtcagctcttttctccgccagattcacaacaaactctttcgagtcaaaaggtaatggaccagcagtatagaggcttttccttccatcatacgctggtgacttccctcccaagtgagagtctttataattcttaaccagaagtttcatcacgtttctgttcactgtctttgatataacctcaggattgatcgaaacctataacacaataacaataacttttagccaaaaaatctctatatgactaaaacaagtcacaaccgcagattcatcatgtcaaaactctctctaggaactttgtgaaatacatcagatcaacaataaaaaggaacaaacaacagtatattcgtcgaatgaaagcaaaaaaaaaaaaaaaccaatgatgcagaaactaacaaattttcagtcagaaatctcactgaaagaacaacttcagatgaacacaaacgacaaaaaaaagttcatcttttgacgtacaaggtttacaaaaactgaacaacaacaaaaagcaaaaaacactataacttgatgaaatagaaacgacaatatttgaaatcgacacataaaaacgacaaacaagtacagattcgtcgagaaaaaatggccggaaacttacatcgtaatggtagagatcacgatcagcaacttgaacaaggaaatgattcgcacgaaccatgactttcttccccaaagtaccacgtcctggccgtaccggaaacgtaaccgctttagatgacgccggaggaagtgacgtcatttcaggtttcgtctccgtcgaagtaatctgaaggttcgacatggtctcagaaacctccgtattcttactttcctctttagatgaagaagcaacagacaccgtcttagacgaagacgcaacagaaaacgtcggatctccgatgttaccacgacctctcccgccagaaacagcagaagcaaccggaacttgcgtcgccgtcagatctccagtattttcacctcttccgacgtttccacgacctctaccggcggaaacagaaccaccacgaccaccgtagctttgttgtaaacccggccaagcaacttgaccagaagactgatcttgtctctggtcagaccttcgtccacctcctcgaccacgactagcgccgccgtgaccaccaccaccacgatttgacattgtagcggaaagcttcccaaagtagaaacaaaaatcttttcaaaaacggagagagagaaaaactgagaaaatgagagagaaaactggttacttgtgtgtattgtgtgagagtgggacgtctaggttttaaaaggaatctaaaagatcgtcggttttttaatttgactattttgccctcatctctttgcattcccggtttttttatgactaaataaacgaaattatcattgaccattttgccctcttcagagttaaaaggaaaatcgaagagttaattaaattactattttaccgtcgtggcttttttaccacgttccacgtaatttcatctgtggcggtgtgggctgttgatcgtacattttcttaacttaactacagtctattttaactctactagtattagtctgttcacttttttataaattgatatatgctttttgcagaaccagaatagagatagaataacagtttttaccactattggcttatgttttcacttctgctttaatttatactgatttacgaattacgaatataaaggactatttattttgacaaataataacaaaagaagaagagaaaaataaaatgagttacgactatttgtatataatttgtttgtataataaatgttcaaatataaataaataaaaactccaaagaataaatataatttcagctaattatgatgatattgatagctgacacaaatcataattccctctttaactacaccatctcaggttttatggcagcttcattggttacgaggtctgatttttttatttttactgatgttagaaatacaaaagctacggtattaatgtttgttcttatcatctttcgttaagccctttgtcgtacgaaaccatttttttaatttgcttttttattagggtttgaaatttgaataatgacagtgatatttgaaaatttatttgcatgatgacgacaattgacaaaagaaaagtttatttgcataataccgcttttatctacgttgcaaaggactgatatgcatataaacaaattaatagttgtctatcttttatttgttttaaatatagtaataaagatcgttgtgtttatttgttttcttttacttaggtacttgcaaattacttgatagttgatacaagaaaagatagaaaattcaacttttacatgttcatgtttttaatagtggaacgataggctaaacttttttatcacgtaaataagggttacaaagtaattttgtatgctaatccttatttgcatctgtcaacattcaaaattcttacatttcaaatgggattatatagtaaagggatttgactaatgactaaataatgtctatgtaacgcgttcaaaatggtaatggtaatatatattagtatatagtaatagagttgatgcaagtaaaaaaaaatcactaatgtgagataatttttcctttttagatacaaacgagtttggaacgtggtacgtatatgaacagtccataacataacgtgccaaatagaataatcgattttggccgaattaagttcatggatggttacgattgaggtgtaagtcgtaaagcggttttggtagaaaatcttgtggattcgattggaggatcaagagtatagtcaagacattgaaattgcattagaattgttcaagaaatatactagaatgaaataaagtaaaatgaattcttttatcttcatgggctagtacctagtaataccaaaagaaatggtatttttggagaaattagaaattgatcgtgtgccatttagttaaaggaagaaataccaatttttccaatccagtttcaggccaatccaacccatttttaaaattcttaaatctttattgtagaacatggttttatgttgatcaaatagtggtgtccgtataacttttaagtgatttgcaatcatatttgggctatatctaaacctgagactttgagccgaccggtttattcgatttcggtttgtcagttttgcagattattcagaaaacaaaacctatcccgaatcaaacttattccacattattcagttcgttcgattcggacactcatatatatatatatatatttttattgttttctccttttatttgtttgcatctaactagtgttcttaattttccttttccataagaaaaaactaggagtatgtttagttgtatttgtaatctttggtatcatttaggtgtaacttgggatttgggaaaaatacatgattcaagtttggttggaacgtgttgtatgataatgaagaagcactgaagcattgatcagtcaaaatgctcgggaaaaggatgattatatgaatgttgttgcatagggtacaactttgtgataagaaacaaacaacctcgcattgtattatttattgtatagcgagtaggaagtagtactatacgatacttcttcctataaagttatatatttataaaggtataaataaatatatacctacgaaaagaaaaagtaattaaatttgtaaatggatttgtgcaaaatccaaattttaaagaaaggtatggttaggatatttgatgagagtttcgagggttttgcttctcggaaaggtacctaattattcatcattttttctcttctttttttgtctcaatccttttttgaaaagaccaaaaaaaaaaagcaacgagaaattagcatctttttttcatcatatgtgtatgtatatcaatgatcgaacggtcgtcagctcactgtgaggcaacacatgaatccaattagttctcaaaatttatccattatccacaattccacataatggttagcgatattcatataaactctcttcataatgatttttttgttgaaaaaacttctgatactacgacatgcaaattagaagcagtattaagaaacttacttttttttttgacacactatttaagaaactacttaagagttaagagttaagactgaagcttaattaaaataacgtcaataaaatcatattttgtttaaattatttccctttttgggcaaataattaaattatttcctaaccagtttaagtttcgtaatgcaaaatggaatctctaatgttgctgggtcaagttttcttctacgtagaaaagactttttgtattgattccccaaagccattcttctcaatgtaaatttgattttatcagaaataataacccaaaaaaaatactccaaatgtcttttcaatataaaaattaataatttgacttgatatcaatcggaaattacaagagagtatgggaagtcgtggtaccggagagagtgcggctcttcctatggcttggaatgcagcaagttctgatgacgaatgctgagaggaggaggaggcatctaagtgattcggacatttgccaaatctgtaaaggagctgaaaaaacaatcatacatattcttcgtgattgtcctgctatggaaggcatttggatccgcttagttcctgcgggtaagcgccgagagttctttacacaatcgttattggagtggttgtttgctaatctgggtgataggcggaagacttgtgagagtacttggtcaactttatttgctttgtctatttggtgggcctggaaatggcggtgtggcaacatttttggtgttcaagacaaatgtcgagatcgggtgcgtttcttaaaggatctggctagggagacgtccatggctcatgtgatagtcaggacactgagtgggggtcatggagaacgggtggaaagactgatcgcgtggtcgaaacccgaggaaggttggtggaaacttaatacggatggggcttccagaggtaatccgggtttagcgtctgctggtggtgtgctacgagatgaggaaggagcttggagaggaggttttgctctgaacattggagtttgttcagcacctttggcagagctatggggagtgtactatggcctctacattgcttgggagcgacgagtcacacggttagagattgaggtggactcagagattgttgtgggttttttgaagatagggataaacgaggtacatccgctgtctttcctggtacgattgtgccatgacttcatatcaagggactggagagtccgtatttcacacgtttatagggaagctaaccgtcttgctgacgggttagccaactatgcattttcgttaccattaggttttcattctcttagtttggttccggattctttacgttttattttgttggatgacactagtggagctacggtttcacgtcaagtgcgaatgtaattttctttttcattaataaatcttgggagactttgtctcccttggcttacccaaaaaaaaaaatcgaaagttacaaagaacgatttatctagttaaaaagaagttttttcttaactcttaaacacaattattagactactaaacattcataattaataatcatacaaaatgattagtcgaacaaataaaatatcgcatcctttccaatttaaacgagatcacgtggaagcgagtacacaccacgcgccgatacagagagtgagatttcaaaattcgacgaaccaatttgcctccgttcacatgcgatgcatcttctctcttaaatatccaccgtcaccactctctcttcctctttagattctctctctacagagaacttgattattttttctgatctgagaaaaaaaatggcgaatggagctaatagagtggatctcgacgggaaaccgatacaaccgttgacaatatgcatgatcggcgccggaggtttcatcggttcacatctctgtgaaaagctcttgaccgagacgccacataaggtgcttgcgctcgatgtttacaacgataagatcaaacacttgcttgagcctgataccgttgaatggagtggtcggatccagtttcatcgtatcaatattaagcatgattcgagacttgaaggtcttgttaagatggcggatctggtaaaaatgcttatcgatttcgttttttgatctcttgttcttcggtgtttatgatagaagtctcagatctgattcgttatcggaattcagatgtttcgcaatgtattgagatcggtgatgttgtgatgtaattctgatgtttctttttggattcgcagattataaatcttgctgcgatctgtactccagctgattacaatacacgtcctcttgatactatctacagcaatttcattgatgcgcttccagttgtatgtgttttcttcttagcttcgttcattgttttgctttagctcttgtttttgaagttgatggagacagtgatgattgtgtaatgcgttggttttgttaggtgaaatactgttctgagaacaacaagcgtctcattcacttttctacctgtgaagtttatggaaaaaccattggaagctttcttcctaaggatcatcctctgcgtgatgtaatgcctttttgtacatttcgctttccacatgttattgtctttttatcaatctcatcgatgaatgtactgaggaacatgttgaagctgacgttttcgttcgttttaatagccacattatgaattactcattggatctcgttaaacgtatttttgaattgaattaagactttagtccgctagtctatcacacacccatagaagcttggaatagttgatattattcgtctaaggttgggttcactgtttactgatgttgtttgttgtgcctttctacaggatcctgctttctatgttcttaaagaagatatttccccttgcatatttggttcaattgagaagcagaggtggtcatatgcgtgtgcaaagcaactgattgagagacttgtttacggtaagcatttctgtttaagatgatgttggtaaaaacaaaaggtttacacttaacttcacttgtttcttgtgacagctgagggtgctgagaatgggcttgagttcaccatcgtacgaccttttaactggattggacctaggatggatttcatccccggcattgatggtcctagcgaaggtgtcccacgtgtccttgcctgctttagtaacgtaagtgttcaaatccaagtatataacccaatgctagtctgtgtatatatgcaagcttttagttaatgcatctctatctatctttcagaatcttctacgtcgtgagcctctcaagcttgtagatggtggagaatcacagagaactttcgtctacatcaatgatgctattgaagctgtccttttgatgattgtacgttccattgcctgatatatagctttttgtttacaaactgttaatgttagaagttcgaagtagtttcaactaaaacctataatgacattgtatgtttgtggttcaggaaaacccagagagggcaaatgggcacatcttcaacgtaggcaacccgaacaacgaagttacagtaagacagctcgctgaaatgatgaccgaggtgaggaagatggatcagttaggaaactatgaaaatagtttgatttctctgtcgctggttctcaattctcaaaacgaatcatgtttcaggtttacgcaaaagtgagtggagaaggagccattgagagcccaacggttgatgttagctccaaagagttttacggggaaggttatgatgacagtgacaagagaatcccagacatgaccatcattaaccgccaactcggtaattcttcataatcaccaacatgatagataatatgctttaaaatcaaaatcaattgctattctgatagaattttggactttgaaaataggatggaacccgaaaacatcgctatgggacttgctcgagtcgaccttaacctaccagcacaggacatacgctgaagctgtgaagaaggcaacatccaaaccagtggcttcctaaactctccaagaccccaacgaaactcgttaaacacgcgtcattttggcattttactctattcgattctatttttttcatcccagagaaaactttttttcttttttctttttaagaaaacgatataatcacggtggttcgttccaagtataccttttcgtttgtaagttttctctttttgtttggtttgtttggccatgtatgtcggagctgtcagaaagcaagaggttaatcgtttgtagcgaatgataaatgttcgagtgtatattttaaaatgcttcgttttacatgtgtacaagtacaagaacaaatgtaattatcttctgtcaagtaacacattgtgtttcgttcagaaaaaaaacaagtggactacagagtatgaaagaaagtctagtagttttggaacgctcgacaattaaattcgattttatttttaaattgtaatatataaatcacaagtagcgtctgtagtccaacggttaggataattgccttccaagcaatagacccgggttcgactcccggcagacgcattatcattatttttatattttgaattgttttcactgaatttttaattcaatgaaggcaaagcaaactagaagaaaatgagtctttttttctttctttctaactcatgtacataaaatacattgttagagcatattctagttcaactatttctgatttaatatactccatctacttagtattgcgatcaagattagatcataacatatcgacattgtatagtacttatcatgaatcagccagcaacttcgaaattttatgaacttgaaaagagcaaaaatcatatttcatttaaacccattaacactccaaaatgacaacataacatatattataataatccaaaaattttaagatgccaaaagcctcataagtcactcaacgattcaccaatacagtcaagtaaaaatttctattggaaaaatgtgacttggtgtgcaaatatcttctactttttgcaagagggaccacaagggaatgggcatctcttcttccctcctgcaccaaaatggttttaaaccaaatcaataatccacaattctcatctcatatgcaaagttatctttatatatcttaactttagttttcgttacctgatgacttgttcttctttccacctttagctatctcaaatgcaccatttggcatctttttgctcggaggagccacctttaaaggtgcttcagcctctacatcttcttcatctgaagagtcatcatcctcgtccaaacccatctaaccaaacatacagaaaaaaacaacaagattacctttttttttatactgattcattgctaatcagtaaatacttaaaagaaaaatctacctcatctgagtcggattcatcatcttcttcaggattgatctcattttgaggcaaagcagcttttcaacaatgtcaaagttagatttcataagagatacacatgtaaatatgactaccacaaagcagtagcttagtaaaaaaagtaaacataccaatttgttgttccatatattcatctaactcagaatctacacaaaccaaaaagcaaaagattagcttcaagcttcataatagagtaaaccaaatcatcaactaaagaattataaactcaccagaatcaatctcctcatccgtgagcatcagaaaaaagcagagcaaaacaaaatcaaggataaacaaacaaagcttcaaaattgcaagtgagtatgaatttaactagaaaaagacaatgaaagaaaggatatagttcgtcaaaagcatcaaaggtcctgtaaccaataagatagacactgcttgtactgttgtgagaaatctcaaactcgtgccctaagtagagatcaatagaaaattgaggaaacttctgtgagagatttccaatcataaacccattctcatcatcaccaatcttcacataaacggcaaaagtctcatcttttttaaccttctcaacgtcaccaagggtaacctaagagatgttacaacaagtaacacaatcaatatcaatcatggatttacacaaagagagaaacttgcaggaattacaaaactgatacagacctgagaggcatggaccatgaatccatctttttgtatcaccttaaatggcttccctggcttaatctcgatacctaaaattgaacattattcatcacacatttgagtacaaattcatacaaaatctcacaaagatagatgctttgacacctaaactcacaaagatatagatactttgacacctaaactcacaaagatagatgctttgaaacataaactcttaaagatagatactttgaaacataacctcacaaagatagatgcattgaaacctaaacactaagaatgctaatattcccaaacaattgtatagttttgaacacaagaaaatgcgtattgagtaatagagagaattcaatacagaagaaaggcaagcttttgtataaagaccagatttttaatcacagaacgaacttaggaataccaaaatgattaactttaatggcgaaaacagtcaataggagtcattgaggtattcagtagaacttaataaagatatgattttgagagagacataccccaaaactccatagctagtgaaagaggaagatgtggctgcttgagaagaagaatttagggttttagagtttgtttcaaacaaacaaaaataatggagcggcttatttataaggttactcttactactcctttaaacttccttttcacaggtagggtttttagttacttcttttggaatagtatattaatgggccttatttttagtgggcttattttgaatcggccttatttgatgggttttagatatattttaattttatagccatgtcataagagttgcctatgatttgggtaattaactttgcttcaatgatcaaagagaaagaatgttgattaaacaaataagagaaggaagagcaacacggcatcaaattggtttactcaaaaatgtctgactttagggataaggttgggcaatgtcgttatcacataaacagaatgcaaaagttctattattagaggtccaaaaaagatattataaaaagataatatataatatacaatgttctattcagtttataatacccatttcatggctatattcatccacgaataatgctttatagattttcaactatataataaaataagaatttcatcaaaatagtattggtaaactttagaacttcatataatcatcttggtatataattgattaaaatacattatacaccactaattaatgattttcatttctacatagaaataatatacacagatgttttttatatcctttttctaaagaatggaactaatttgaaaaagcaataattcaaaatgataaaaacttctagaagcccataaatttgagccaatgaaaaccagttttagccactttctctgcttccttagaacaagattccgacgataaaccacagccgataaaccctccggtctctttccgaccacataagaaaaagtttctcgaccctagcgatatcaacttctcgtctcttacaatactctcaagactaaactgcgagtaatgaagatcaaatcgtgacggttcagattccggtaaaaatggccggcgagcttctttaacgtactgacgaacggcggcgtcgattaaatcactcacggtggattccggcgagattataatttgtacggctcctaaacttccttgtaccgtcacgttaagtaaaagtttcgtcaaacgtggcggaagtgaaaccgtctccggtacggtgatgctttgaccggtggagaataactccggtaacgttttcggtcttcgaagctcgcctggatttgataacggcgttgttcctctgccgtgaaacgacatcgctttctctgataactttctccggtgagacttctctgtttccggcgttgttttccggttaccgttcttcatgtcttctaatctttatcgtcggaagagtatgaagcttggagaaggcgaaggctctctcgtgttatcgccagtcaccggaagaagctagcataaagtcagagtggcaaaactgtaaatagtggaggatgatgagggtaaaaggataagagtaatggaatgttaagagaataatacaaagctgaagagtgaagtatttatagtggatttgtagataacgaaacggtgagaaattgcttggaaatttctgagagtgtgagagaagggaaccggctataggaggtgaactggagtttcagttatgtgtgtgagttcggtattgggtccaggtttaaccggtggctatgaattttatgaaattgttatatccactgggtcgtagaaaccaatttggactaaggttttggtttggactcgactctttgttattttcattggttactttgtaatatagtgttcacctcttgaaatactcaatgattatcattgtttttaattaagtttagtagtagtattttagtttggtcaacacaattgattttgtgtaatctttgtgaaatcaaagtaattatgagaataagttcattccctttagtagaaattttactacagtatattcatgtacatgatgcattagtaacagaaaacttcaaatgaattttaattatatacttccttttttactaaaagatgcatttgtaacagaaaacttcataatggatttgaatgcatgaatcagacaatttttatgaattcaaagtacgatacataaaattgatctgatatgtattatttcacaaatgcatgaagcaaaacaatctttttcacaaagtgcacacagttttttttctatgttttgtgaaataaaagcatgttagaaaactacgtatttttattatgtagtatgtatttatgttgcttttctcatttctgtattaattatcataagatagatgatataacgatatctagttttgaaagtttacaaattataaacaagacttatttaagcactagctagttaaaccgggtaagactggagataagactcttgcaaggttcgacgaacaaaaaaaataaaaaaaaagaggttcaacgaacaaagctaggcctacaagagtacaaggccaagtctctcttaattacaaacaaatagaaacacggtgtaacatacaaaaaacacatggcaggaacagaaagcgaagatgggaccaaacggccgacataactgaaagatgccggagacgtgaccaatctcatcctcttcaacttgttttgcaattagtctcctcaataattgcatagtatagtaacatcatttggacaattacgttgcataagtattaaatcaaagaatcaagaaatacacgaactattattgcagctaaacttgacttatcgagggtcgaagcataacataaaatagatcaattatttatgttgggcataagattacgtaagtaaacctctttgcaaaatattatatgaccaacttatgtgaggtttaacgaaatatctaattttaaactaatcaaaataggagtggacctaatattagtttttgttctggtatgtatacgagcttcttcgctttgatgcttcacgtggcctaattatattataaccataaaaagtgttatgattgaaaatgcaattttatttagaaagattgaatctcatggctgatataataataagaagcaaatttcgttaatacacataatagaaacgtggctatctgcacaaatttgatagatagccttccacgatactaccccaatttgcatttgaattaatgatgcttttgctacgcgacaaagttatcttcattttattttgagcagaaaatgttctctcttttatttttaagtttggggatgttgcctcccccggatgacagcatctcaagcttgatatattattatctatcgaagcttatatttagaatttaagggggtgatgcttgataaagaacgatagatgagaagtaccataatatgtagttgattttttatgtcgatggattgaagaaaacgggatcataatctttgttttaattgcccaaagtcgaaactgaaagagtcgatgttgatctatatcaaatacagaatattaacgtatgaattttaaacaataattgttattgatgtcgctcatgtttgggcttttcatgtatatgggtttctaatttacgatataaaggctttcaggttagtttgtttaaggcccatgtttgttcttgatagcaattatcaagtgcttattatttggattgagaaaaatcacaagtttaacactattacagggagctaaataacaattcaaaaaataaatcactcaaatttattgtttgtcttcaaacgcttaaataattagaactgattagaaatgtctcaattattgttggttaagatagtttgtaaacaaaaaaaaaattatggtcaaatagagaataaatcaactcaaaacttgcaatttcataataaaactacgatcaaacgaaactccaaagtataataatgtaaacagcaaaatacaaaagattgatctttggagaaataagtaatttattttcaccaaaattatgtttacaactttcttctccaatttacatacacaattgacttcacacgttggttatgatcttagtgttgtcacaatgaaaatgttgatgacgaagaggacgaagacgatggtgaccaagaagtcatatccatcggataactccccaaaacccgtaaaaacgacgtaaactcttgaacctcagaaagcgcattctgagcacgtgactcggccatggaagcctcgaagtcgatataaaacatatactcaaaatgcttagccgtgcccacattagcctcatcgactagcctaataggaacattatggttcggcctagactcaatcttagtcaaactaatgttcctaaacgcaaaagcagagagaaccttaaacaaaacgcacgtgcctttctcgtgagcaaacactatactcgtcttaaacggccgatcagttctcggtataatcggttcacgcgccaacatcacaaagcgcgtgacgttactcgcgtcatcttgtatcccatcttccaaaatctccaatccgtagatctccgccgcgcgtgcactcgcaatcgcggcggtgtcacggatattattcgcagcgataaactccgccgcaccggcggtatcatcaacagcttcacgagctacgttgagaccgagtttagtcaacgtgtgttcgcattgagctagtccttgaggatgagagatcacacgagtgagaaactctttccgtacaccgggaagagcaatgagacaatgatgaaccggaagctgaacttcgccgacgatgtgaagacggtgacggaggagaagatcgtaattacgatgaatcgaaccgccgagtgagttttcgacgggtaaaacagcgcgatcggcgatccaaagctcaaccgcttgaaacgcaacttcgaattgatcgcaaggaatcgcttgacagttaggataagctttaccagcggcggcttcggagtaagctccgggaacaccttgataagctacacggaggttagatccatgcatcggagctggagatagatctgaaatacttaaaggcttcttcgattgaatcgattggttgttgttgaatggaactagattcaaatctgagactccggcgccgttgttgtgaccgttgacggcggaaacgtggtaggatgatgatccattggaattggaagataaggattcagattgttcttgtgagttaactttgcttgagagaatggcgcaggagctttgccaatcggagctactggaattaatggagaaagagtcagatctcttaccggcgcaatgtatgacgtgtcttcttctcgccgccgttgttaccgttgccggagtatgggaaggtaagagagttctcatttttttattttgaggttttttggttatggaaatgttttgtttaagagtaagtgaagagtgttgttgttataggagaagagaggaagagcgtggaatgatcttgtgcctctcaccgttcttcacctacctaccaccatttgcgtaatggtgggccaagagagataagcccaaacgatgtcatatctttttcaatccaaatttttcttgaatagtctcacttttttttttaataatctcaaaccaaaatccatattaatccctaaatttatgcaactcaaattgtatttgtttatcatccaatttatttatttaagatatttatggtacatataaaagtagcaagggaaaggttagatcacatccatctacttttgttttatagtattttaggtaccaaactcttccaaataattggatatttttatataccatttgtatgttataaccaactctcaaaagtctaaagtctaaactttaaaccaatccatatacgtaactgacccaccaaaatcttttaaattcgcaatagatttaacaaacaaggaataagatagatagtgagaaaaaagaataactctagttacaaaagcatttgatcataatctatataacttacaacaacatgacttccatattctctgtttcaataaccaaaaactctccaattgacaaacttgtgacccaagaaaaagcttccaccgtgttataaaattgagagactactaatcaaaataacagagacgacgggaaaaagaaaagaaaaagagggatctctcatctgacatatttaccactttttgccattgtgttgttgttttatcaaatgcccacccatttgacccatctgaaaaacctccccacccgaaacggcagttcatagtctttagcaagtgctggttctcttgttgcagtctcactgtcagaccaaacataaactccgcgttcttgcttgctccccgggaccgtgttgtccaaaatcacagccatgatgaacgcaatcaccatgctcattgacaagagcgtgttcatcacgtagttcatctgcaaatacactagaagatatgaaaactgaaggtcctgtgaaaatgaaagtgagcgcaaagcgtaacgtacccctttgtattggcttttgaagggtccatgtgaagaaacaatgtaaggttggtaataacttggaacagagagattcgagtttggagatatgccatactgctggaagtaagctgggacagagagagaaaagaacagcgacaacccaacaattatgatattccgcgagcttccagcttcactataacgtaagttggaaagacctaaagccgtaaacattgcccacatgaagcacagaagagaagcaaccatgacttgcggaattgatgcgagaaaccctccaaccttacctgaggacatcaaaaactgttttagtcaaagagagtaaaaaatggtacctgttgtacagttgagctaattttcagatgctattgatgtatagttacttgtatttgctaaagaggtcatgtaaattatgaaatagagttacattcaaaaaaaaaattatgaaatagagaacttgaaacttgaagataaataagcagtgccacttacttaccaacaagagaaaatataaccaaaacacacgcgcctaactcaacaactctgcggcttcccattttggtcacagcgattgtgtgaacgttttcggttagagtggttgaaccagtacctgtaccccaaagaccggctaagacacttgtgaaaccttcaagaccgattgcccgactcacaacaccacgagttggaggcctcgatgctactaatagagaagaagcatggtacgaaccaacctgacagtaaaataaaaaattaccatatatgcataccgtaccgtaaactgattagtaaaagtgcaaaagtttgacttccaacacataattttgatggtttaatcaaagatgataggaaacactaaccgaatctactgaagcaattacggagaccacacacataacaaaagccattttccagttgaataacggtacaccccattgcaaggggtaaggaaacctaaaccatggggcggaactcagcgcatgagaagtatcaacccgacagtacttcattctggtcatgtattttctgcagtgggtcgatacaacatttgagacaggaacgtttgggtcacaacctttgtaggtgtaagctcctgtttcagttaaaaggaatgcagcagcccaagtgattgcaagactcaatggaacctgtcagtaagaagttaaattaggtcagtcaaagtcacatgtagagttggaaatgtcagatgattaccacattatcagagttgattcaattgaggtaaagattactcgagtcttacttttcctatataccgaaagagctaaggaaaagcagacatgaacctacttaccgcataaataaggaaaatacgatggcttaaaactgagattttccggaggtactgcagaaagaatgggaaagtatcaaattttgttgacatgaacctgatgtgatatgaaatttttgaagtaacataacttcaagaagaaaatcaaaacttgtaactagcatccaaacaaactccatttgcaaagagggcggataaaagtaacttcactaaacttacaagagcaaagatgatcacaagtagtatctgcacaacaccgatctcaagacatttaccaacaagcgggaaaccatagctgtaaaaggaaagtccaactgcagctaccgtcggagcaacaactactggattgaccaacctatacagaaggtcaagagaattatgaatacaagttaatactgcaccacacaaagccacaacaaccatgtgtaaacaaaacagcaaataggacaaactcagagatgtatacctcaaaatcagtgacattaggccactgtatccaagcactgcttgaaaagctgaaccaattatgattgcaccttgcagctccctcatgatatgcttgaagttctaccgtattaaccaaaacacaaaactagaacaaattaacaaaccatagaaaaaagaagaattgctatagacaaacacagaataatcagaaatgccaagagtagaaaaggatgttttcaatccacccttgcctagtgcagaagtcttcctaatgacgatttgttatttctcgctaagtaaaatttgccataaaagttgaaagagagctccaacaggttacttgcatgatttttacaacagattaccctaagcagcaaaaaattacgaggctacattctgaaataacagctacatttcgatagtaacatcaccatatcctcaacggaacccaatgactgacattttacttaatcatagatagcagaagaggttcttctttcaaacttacattatttccattcaaaccttgaaactctggagagtttattatagccaaagccggagccagaaagacaaaggaaggaccttgaatcaaaggaagcctcgacccaaacgaagtatgcaacagtgtagtgattccagagacaaaaagtacagtcgatacaacatttgcaacctcctcctataatccaaaaaaaaagttgaaattacatttgcaatcatcattgtccaaagtagagagtccaaaagaatcacacttacatgtgaacctcccattgcaggaacaataacaagtggaaccagaatcaatgatcccaacattgaaaggtaatgctgcaaaccatagaacccaattggaactgaaaacacaaacacacacaacaatcattaaccaaacaccaaaaataaaaaaaagaaactttaaaaagattcagtcactatctgacatgaaatccacaaatggaatctatcaatatattattaattaccaattatatataagtcataatcaagagaatcaataacaatttaacaaatagtaataataaaaatcagtactaaccaagtccaggagtatctctaagaccatacttcatatgcaaattcctagccactaaatcatcatccatactctgaggcaaaacctcaactgtttcttcaatacgacccggtcttctaaccgggtcacctgacccattagctccatcgggtccatttgatcttccaacaaccccatcagaatctctccttctcttaaccggttgatccttaaccggaacagcaacagaaccaggaggtggtggtggtggcttctctttcttatccttgtcagtctcaccgttagttactgcggcggagacaggaggaggaggacggagtctggtttgaccagcttcaagatccggttgggtttcttgttgtttagctctaaccggtaatgagagctgaccggaagaagaatcagtggcggtagtttcaccggagaatttgggacgaaatccggtttttttagcccaggaagacggtggcattgcggcggattctggagttggtggccatggacccggtttaggtccgggtttcgggtcggagcttgacattttttttccttgtggaatttcttctcagtattgcatagtgaagattgaaacttttttctttagatctaggaaaactctcaatcgtcggagaaggaaaacgacaaaagaaaattgggaattagggttttcttcaaatctccagagagagtacagttgtgtgtgagagagagtgagaagttctatgaagaagtaacagtgaatgtgaaaatgagagagagagagaggaaaaaaaatctaatcttttttttttttgacaataaatctgatttaacataagatttaagatattaaacatttcaactttttttttttctgttttcattttttttgttgtggtataaatttacgtcgagtgatgcaataaatcgatttatatggttagaaagtagagtatatcctgaaagacaagaccaaaataacttatgtctttttttctttctgttgtcataaaaaccaatgtatagcttatctgaaatctgtgtttctgatgatgtaataaaattgacatgcatgaggataaataaccttttaagggaacaaatatttatttggcaaaaaaaaaaaaaaaaaaaaaaaaaattatttggcatgaacttgagaatatttagatgacgattgatactctttatatataacaacaaaaacatttcatagagatctatgaatgataaagattttttgttcaataacaaattattaagaatttaactcatttttaagatttaagcaatcattctaccttaactttgatagataaataaaaacaagaagagtgtggatgtctaaatgtaattgtggtgattatattcatatctaaacacttatgctaacatacttataagttataataatgtgctcgccttcatgattccggttaatcaaaccgagcaattccggtttagtttctacagtttattgaaccgtcttcttcagtcccttcaaagtttgtggttttgggatttgcagaacgaagcagtcgaagaaaaatgtctgcaactaggtctacatttctaggctccatcttcagaaccgctaaagcacgaattttgatctcacccatcgctagacgctctctcccaagccctaatttcacttcctcgcgcttccacacttcttcttctcttcgtcagtctcgaatcgaaggttctattccaaggtttgtgatgacgtccttgatgtttgaatcctcttctgtttttttcctgaaatgaatgtttttatttgtgggtttatcttactctaatgcaaagtttcgattttgattcgaatccagaagttttcttccgagcatccatgtacgatttcatagtgttagtgcttccacttggttcagttctcgacgaacctcttctcaaggtacttatgtttctctgtatcaatgatgcttgttaaccgaagaatttagtcgaaatggtttcatcaactttggtaacgtcttctaattgagagcatttctcttgaatcaaagtgtaggtcgattagcatctgtttccatgtatatacaatactcaacttcagtcccaacacgttcacttagaaggagaatcagcaatagaaagaaatcgagtgcaaaaccaatccttaatgtttcaaagtttcatgaaacgatatcaaagcttccaccaagattcacccctgaagaactagctgatgctataactcttgaagaagacccgtttctgtgtttccatctctttaactgggcatcgcaacagccgaggtttacgcatgagaattgctcttaccatatcgcgataaggaagctcggtgctgcgaaaatgtatcaagaaatggatgatattgtgaaccaagtgctctcggttcgtcatattggtaacgagaatctttacaattcgatcatcttctatttcacgaaagccgggaagttgatacgcgctgtgaatatatttagacatatggtgactagtaagaacttggaatgtagaccaacgattagaacgtatcatattcttttcaaagccttgttgggtagaggtaacaactcttacataaaccatgtgtatatggagacagtaagatctttgtttaggcaaatggtggatagcggtattgaaccagacgtattcgctttgaactgtttggttaaaggttacgtgctctcgcttcacgtcaatgatgcacttaggatatttcatcagatgagtgtggtttacgattgtgaaccgaattcgtttacttatgattatctaatacatggattatgtgctcaaggtaggaccattaatgctagagaattgcttagtgagatgaaaggaaaaggctttgttcctaatgggaaatcttataactctctggttaatgcttttgcgcttagcggtgagattgacgatgcagtgaaatgtttgtgggagatgattgagaatggtcgtgtggttgattttattagctatagaacactagttgatgagagttgtaggaaagggaagtatgatgaagcgacgagattgttggagatgttgcgagagaaacagcttgtggatagagattcttatgataagcttgtgaatgttcttcacaaggatttatagaagatgtacaaaatgatgtttcttattttcttgtattgtcgaaatttagatgaaatctgtttattgtttttggtttatggtaatgaaaaaatagtgagttactgtaaattcagttcttctattctcctcaatgttgcaattgccattaatttgaaccggtcagggtaaactaaaagtatatgatcggtctgtaaaaaccgatgtcggttaacctttcgttaaaacgatgccgttcggattaaataaatttctaaaagcttctttcttttattcttcatctcgtcgtctctgcttattgaatccccggcgacattccggcgaaaggtactcgacgtttgttttatctatttttactatctgcaattagggttttgtttgggatatctaatattccagacttactgagattgattttgtgaaattgctttgaaattttctgggaaactaaacgtgaacgcacttaaaagttttgtcttttcgtgttcgtctcagaattggagaagatgggtcgatacaaagatgaaaccccagcggttagggtttatacagtttgcgatgaatcaaggtctgttttttactttgttcttcttgctttctgggctcaattattgaaattttgaacctttttgttggtttttcagatacatgatagtacgtaatgtcccagctttgggttgtggtgatgatctcatgagattattcatgacttatggagaagttgaagagtgagtagtgtgctcttgatactctttttttttgtttcctgcattgttcttatggactatgatattgtagatgtaaacctatggatgcagaagactgtgcggagttcacggatgtctactggatcaagtttcgtctcatcactaatgctaggttttgattcttctttccctttgatgatcatcactgagattcttatttggttttttattgattccaaactcaagtaatgtgtatagtgaaaaactcatcactgttatgtcttagcgttaataggatttttgtttttcttccctttgtgtgacttcatagtgtaatgatgtccggattttatgttcattgcagctgaatccgtcgaattgagctgtgtgatttgtcttacgatatgcaaatgaatatttttttgggaatgagtttgttttatgtttgatacatagaaaaagaggcgtaagtaggttccttggggtgattttatttcctttggctaaaagtgtcgaatttttttatgctttacatgttttcttgctatattttgtccacttttgattccaagaggaagaatttttatatgctttacgtgtttatgtttgatagatttgcaaagaggaagttggatgaatcaagttttttgggaaatcggctccaaatttcatatgctcctgaatacgaaaatgtaaatgacacaaaggataagttagaatctagaaggaaagaagtgcttgcaagactgaaccgtaagctttctatttacgcttcagctagttttatgatacatcaagaaagattatcaatgaagaaattggaaagacattgtgtctcctgtagagtatgaatcaaaacattataacctattgacgtatatgtgatatatctttatccctttatcttaacgtacttatttcataggtaacatacatcattcatatgtcgcaaaagctaacattttgtttatagcattgtattagtaaagttgttggggttggaaaagcattgacaaggttgatgtcaaagtgggataatattaactgttaagacgatttacagtataacttcacaagtctaatatggttctcatcttgtgaacagcccagaaagaaaagagcacctcccaagttacaaaattggctggaccagctttgacccaaacagacaatgtttcctcacagcggtaaaacatatggtctacttggtctgttctttgtatcgtcagtaaacaaatagagttagtgcatgagagattgctctttttgtctgtaggagagagatggagtaccaattccatagaggaaatgctcctgttactcgagtttcatcagatcaggtgtgtgttttatttggtgatcttgacatatgtgtcattaaaaacttggtcatctgttttccgctgaatatattggcctgaataagtctaactggattgtgtaggagtattttgcgtcatcttcaatgaatcagacggttaaaactgtgagggagaaactcaataaggtaaaaaacgtaccgagtttgtattttacaagtgaactcttacatattttgtagactcgtgaagaaaacatttcctcattgtcacattgtaaacagattgaagaaagtggtaaccaaaagaggttacaaccaagcagccaaacacaacctgaagaaagtggtaaccaaaagaggttacaaccaagcagccaaatacaacctgacttgaagagaacccgagtggataaccgaagaagaatataacacacttttgttttgtttctgttttttttttttggtattactcagctaattgaaaaccttgtttactacttgatcatataatagtgctcttgcaaattgcaagattgtgaatattgtaatttatgcctatcttgaaaacttgttacagtcctgaaatcagtaacttctctttatttgtccaatctctatttactgctttaaaagcaaatcaaaccatccaaaccaaaactgtagacaaattgtaatgattttggttacgaattgatatctagatatctaagatattttaatgccatatattttgtaggaaactaattaattcccatgtacataaaagaaccaatcgtttcgtactcgcgtatttaccaaaaacaaagtcaaagatttgtttacatgtggatttgttacgatttcatgtaatattcagtaagttatccgatttatttactaagacaaaatatgaacctgctttttgtaattaagaaaattgttcatatcgtatcacggccgttggattaactgtacattcacataaatttattggattggccgatcataatttttttatttgatgaaacaactctcagtatatcttctatctttatatctcataagaaaatccaaatccaaatctaatctttgaatctcacgcgactcaagtttcctttttacaagtcctcctatatatttactcttggtcattatctctttcatatttcgacttcaacataaactgaaaaccctagccacctgatgatgaagaacgaagaaaagatgagagtgagaattgcgaaggagagatctgacttgtgcgacttgactgctgctgcaattaaggctacttacaatacacggaacccatgcgaagtcgagcgatgcatcgacgtgttgaatcacttgaagtctctgtctctttccgtgaaggatatacgattgtctgaatcaatagttaagttggagactttgagaagtcataggaaccctagaatccgtaaggcagcccaagccttgtttcattcatggttgaagacattctacgcacatggaagcgacaactctttcaaagctgctcttaccaaggatcgtctgaagatggagaagcatgttctaacaaggtgttcggagttgaagaaggaagacgaaccgggaactatggcttgtcaagtcactgcctttacggtgttgaagaataaagaagacgagagaactctgacgactgttgaagcggtagagagtaagacaacgatcaaactctcggagttgaataagaaagaagatcagagatcattaactcgtgaaacagagaagattaaagcaaggaacagctttttggctttgaaacagaaagaggatcataaatctgagacttgtgacgagaaatattttaagaaagagacaaagaccaatctaaaaccgctcaacatgaagacaaggcgtgtctctttggtggatgttacaacgaagaagccacatgaagatggttcattgataaagaagactaaaacagaaaaggagctgaagaagaagaaagtggatgagatggtgaagttgtttgaagcagcaaagaaagctgctgatgtggccaacgctaagggagtactttctggtaaagcagaggcgtctcgctgcattgacgctctctcggtattgatgaagatcaacattactccaaaaccaaaagaaccaaggaggatgatggataagcttgagggacttacaaaacataaagaccgcatgatttgccatgttgcatcagcccttcttcacctttggagacagaggatcagagaacaagaacgtaaaaagtctgttaccaaggcttcatcaaagaatatacaaagacgaggaaacttagtgatgtgaagaacaaatcaaagtctcttgtggattcaaaaggttctgaaccattttattgagatcgaatataagtgtgaggaagagataaacccatttgtaagcatggttgagtgctgagcaaatataatcacatattcgtcaagtcttttttggtcaatatggttttgtatgctttaggattatgcaatgcttatgactttattaaagtaacttcttctaattttttgtttggatcgtacaagcgtcagatgtcttattttatttatatttggagagaaaaaggagttttgtgttggctagacggaacttcatcgattgattcgtatgtaagtcataattaacacgagatccatacatcgttcaacatgcaagacaatttcatcatacaaatttggagggtttttttcacaatataatagaggttgtctattagtcaatatagtaatacacagttaaatctctataaagtaataatggtcgaaccctgaaattctattaattagtaaagatattaatttatcgagagtttaagctaattttataatttttttaaaaaattatgtctgaataaaacaaatttctttataatcattatctctctagaaccaattacacataataaataaatactatgtatagaaaacaacaaaaacaaagttttgaatgtagtaaaaatactaaaaatgaattttactaataagtagataaggtccacttaaatagcgggtatgaaaaataaatttaaattttactattttaaattttatcgatgatatttgaattctaaatagtaattcacaaacttaatatttaatttaataatgttcttattccatctaatcacgaccgctggattaatgtcatatgttaattgaacattcacatgaatttattaggtaggacaatcctaattttatatttgatgaaatgaccctcgatcttctatcacgatctcccatattaaaatatgtttatttgttagtactctggattttgcactttcacttggtagagaataaattatgagatgcgtttgcaatttcacttatgtcatcttacttagtttgtattgttttttcagcatggatttaatatccgaattgcatccgagtatacttgaccatatactagttcgattgcttcaacgaaatgctgttagaacttctgtactctccaaagcatgagtagacaagtggaagaacttgacagttctatgttttggcgatcaatgtggtgttaaaagaactggtgaaaccatcaatgtggtgttaaaagaactgggggaacaagtttggatcttggacctatgttttctcatcgttggggatctaataccttccaacatcttcaagttccttaatctgaccactctcagattatcaactgtttgctggtgccacccacattggaatctgttatattcaagagtgtcaagaagaagacgatgatgtgcccacaactcaatgagattaagcaactagttaaacactgcaaactgatagagtctcttagtattactagtatcgactttttcaatctgatgacagaagatgctccgagtatgaaggatttgactataaagggaaacccaaccatttagctatttagcttgcttccttggtggtctccatgagaaggtataacatgttgagagattcttgatgttttataatgtttctacatttgttgagctaactagttgatggggtttaaaccttataaagtgtttatcaagtaggcatgtttggatttcatagataaaagttacaacgtttagtgtatgtttgattttgttcaagactcttgtgttcatagtaagatagatatttaatttgtgttagattcttgatgtttgatacattttagctaattaataggtgaatttagttttgcaaaaatttatttttttctttcttaagaactaatgcattcttaaccattagaggacaatcttgttaatatactcttttcctaatcataactttaccaaaagcaaaattttaattttaaaaaatgttaagagccaaggttaacaaccaattggagatggtctaagtccaaaccaaagaaaacctttgccgcttatcgaatttgtcccaaattggaactaaaccgagcaattccggtttaattaatgaaccggcatatccagtttttcctagggagggtttacggagaggttttggtggattcgccagaagcaaagaggcagaatcggagaaaatggctgcaattggcatcgcctctaggtctgctacattcatgagatccatcaatagaacagctactgcacgaaatttgatctcatccagagctagaccttctgtaccaaaccctaatttcacttccccgcgcttcaacacttcttctcgaatcgaaggttctgttcccaggtgaaattcgttatctttcgatctaaatctgcttagttgttagatatttgtgatgcccttgattgaaagtttggattttgatttgaaatctaaaaaggttgctgcggcgagaattaagcacacaacaaccatttcacagcaccattgctgcagcttgcctcgtttcgaaacttccttctgatgtcacttctcctgaaggtaataatagcaaaaaccttgtaagattcgtagaaaaagatacaaatgttgctgtgttgtgtgtgtgagcttctttaggatgtggtttagatcatgtagacgtagcgtctcctgaacttggttgtggaaagattcatgattactacctacacagattgctccttgaggtttggcttagatatctggaaggaagataagattcttctaacaactttctattgttgatgaaattgacaggtagatttgcaaactatctcagtcctatctagtaccagaacctgaagtagatgggtggcttatcatcccagagatcgttttgtgctaagtttgatgttttcaaggaaattctcaggttttgaagttatatctgtcaactgtctttgcaatctctcagcttagattgaacttctcatacattttttttggcagatgttactagttccatttgatattattttttggtttgtatctttttaatcaaatgatgattccaccatagttattttcagaatgtaagatatgttgtcccggattcatctactctttcttaactagaaaataagatcgtttgcacgggatgagacctttacgtttgtaccaattgaattatgttccatggctttgtttttgactcaaataactgaataagggaagtgataactgataagtctctgcacatctatgcacttgcttgttatgcagtatctgcatagagactctggattacaaacaatctcctcgtagaattcatatgtcatgaaacatgtgttcttggctttatactgtcctgttgtgaaaatagctgacttcggtactagttttctctgttagtttccaacgcatgaacgtatttagggtagaaactgtggattgtggtccttctgaaggaaaaccataaggacaaagtatgtttatttttctctaatgactcttgtgattgcgtgtatcgtgtctttgcgtgtattgtgtcattgcgtgtatagtttatttgatctgcccagccatgagaagacgatatgttcttggtggtttcatctctcttcaagtaggcatgagtagagagattttgttgatgatttgttgagtgagacatgaaaccagccatattaccacacaaaacggttttaagacatgaaagtgggtatgttgttcatataggttgttgcagaaagtaacaaaactagatatacaatgatgatgatttttgcaggctctagttttggtatgagtcttccacaaaattaatatggaagtttctttggggacccaatttgataccaaaaacaagaagaaacagtctttgttatgattattgaatggtcattgttttggctttgttgccccccatgtggtttctataaagcacttcagttcgttttccctttttgttgccattttctacataccaagccaaagaaacagcttctcttcttctgtttcttttttccactttggccaaaaaagaatcggagaaacaaatcttatagaaacaatttttttttagtctggaagtgttttagttcaattccttgattgtttcacacgaaaagttttagtttctgtttacctgaaatttgttgatttttaaaaagtttataacatgtttgaaaaataaaacatttggtaaaagagatgttttaccaaatggtttatattttttgatgtgaggaatttttacgtgtgatgaagtaatagaaacaaaattgtgcaagacataattgagaaagttaattttttgagttataccaatctagaaattgaaaatagagattatgataaacattataaagttatggagacataaacaggtgttaatatgtagaaaaataccaaaatctgaatagtgtaattttcatgtgggtgtgtctgttaagtgcttccaccaaacttcgtgtttccgacctaaatatattaaaaagattttgataaaatcactctgtaatatattaattttcgtaatgtcaactttgtctcatgagaaagtgattagctaacaaactttcaacaaaccctacaaatctattttctcatatgtagacatgtctgacaaatgacaaatcatcaaatttaatgttttcttaaatcttactaagacactagtgcttttcatttttgtagtatttaaattgacaaattgggcttattatcattaacttctcctaatctctgagagttagttgtacatatacgactaatgacaacaaagcaacatataagaaatcaaaatcctcacatttttggtacctcaaattcagcttatgtaatgttaaacaaagttttgctatccctaaacgacgccgttgatcaaggccatggttctcgatctgaattcacttattatctcttagtttgatattaagtatgtcgtatttttctgacgtaacaatctcttgaatgatctttaatgttattcatttagtgttgaatacatagtatagtatttgtgggtattaaagtgtgtccaaactgttatacaatatgatggatttctatttactttgaaggagagaaaaatgactcttaattaagaaattaagattagactatgttaccattttactatgccatacttaatgatataacacacacacttgaacagttgaactatatccacactcttagatcttctccacctcttcatctaagtcctttcatttttaatttcatctatgtccttccttaaatggactgagtactctaaagtctaaaccatactctgaatccgccttaatgtatcatttaatccgactatgaaagttcgtccatttaacattcgagtcggtttaacacttaggcaaaactagagcttattattcatgactaaaacgataacaagagttaagaacacttatttattcctctttgttacacgataatttcataagcggctcaatataacttagtaaaatcttactccggttttgctttcgttttgtaatgttttttcaaataaaaccgtttatgcttccacttctctcggcattcctttggaatcttacactcatatgttttgttttcacctatacaaaatttttagtggacttcgttgctatgtaatgttttgaccatttctctcactttttggatttatgctttaagatagaaaagtgaagtcatctcttagttcctacactttttggaaagtatgttcaaagcaattatcaaatcacgccagtgcaataacgacggcagcaagcacaaaaactctttaagttatatcttcgcctctcaaggaaatttttttttttttttttttttttttttttttttttttttttttttttgcttttcatgccctcaggacctcactttacaattgtagggcataaaaaatgattctaaccaagtaaccatcgataatgccgttcgaacacttctctttcaagttaatctaccatacacattttagataacaactctttgcacgagtgttcataatttaaaattctctttttgatattttcgtttctttttttctttctcaaattaattttccaaattatacctattttcataatagtatactccattagtttcatattaagtgtctttttaaaactcatattttgtttcaacacaaaataagtgttggtttgtatttttaatgtatatgtttgttaagatttccagttttatccacactattttaatgtattaataatttaataagagatgaaacaaaaaatttaattattttctaatatgcgtagaaaatgccttaaacaacatttttagtgaaacagaggaaatatattggtctagcgaatgagtgtattcaatattatacaaacagtaaatctactctttaaaataattgttttttttcaaaggttcatgtggaaattgttttctagatgttttgagatttgatctcagttactttttagatatgatattaaaactatacataataaacattgagcttcttttgtgtctaacaaaaacccagttacaatgtttccccataacatgtgcttactttttctaatatgaacgaatctgtgactacaactagattctggtattaataacttactcaagagttgcaatatgatagaatgggaatgcttgtatatattgtggttctgaatttaatgatggttcttttgtgggacattacccaaaaccctcacaagtggataggggaccttttcaataaaaatgtttgtacattgtagggtttgcggtcgatgttcccaattcatttcacaattgtctttaatgttcctatccatttgagtcttgttttagcagccttaatgtcatatccattttcccaagatattaactctttcatgtcgactttctaagaaattcgaatcaccttggactaaaccgaaaatcacaaaccgaagacgattgagatcattaacaaaccttagatacgttttcagccggcttaacctacttgaaatatccattttccttctctttttttggttaaatcaacaaatgtgagcttgaatataagtagtaacaacgacactaacacaaacctagtcattgaacttaatgtttgtagaaattaacagagactagatggaaattaaccaaacattattattctgtcactattttaaacatgttttcaacttgtgaaaatatgcccatcatagacccattcatcttactggattttggtaattgatgctgacatttggtattgttaaaagaaatcatatataatgttgttgttatcaggcaagctttgtttcatcatcgttttacaccaaagcttcttcccccttttttagttcccctaattattaattagaatgttatcttctacttattaaattaaaattggggccatgtatgtatgtctaaattaataatatttaagtttgtaaaaaagtcttaaaccactacaatactacccaaaataaaaggacagtaggagaatagactcatggaatggaattgatttcgacgtaccttctaatcacatgcagccacatgacatttctattttgtttctcaagttttatgaacccaatagcattgacctctcaattgaatgtaacttctctacaatgcatctataccaattaaatacattatgttatgtatattcactaagttctttatgaattcataatgtcaaatatatatatatatataccaaatcatccttctcttaactaggtgtctaggtcaacggcttgacttgcccacataatcacgtaattaaagaactttcccagcaacgaactactccaaaaacacgacgacatttgaacaatagaaaacaatcaaaacatattgatataactacagtatgggaaaacgtttttatttttattttatttttgattaaaagacctacatgtatttgtcagagacgtgtagtatgagtttagaaacttagaaacagaaacatgttgtgaattgtatagcaccaaaaaaatagtgtaattataagtttttgttttgttttttttttgcttttttttgggcaaagtataataataagtgtaaaatcctagtttcctatgtttgactgagatgtataagaaaataaatactgacacattttgttaacagtctattaagttatttgcatagattttcgaggtcatattggccttgatttgctttatatgtcactaaatatgaatatgaatagtttgcgatcagcaatatgattacactcaagaacttttttcctatatgtggcctatttcaaaagaaaaagaaataccttattattgcacagattagaatcttaattattataaaatccagatcgaacataagttgaaaacattttgattaaataatcagaaagctccaaaagcaagatacctattattcggatctccatatgttaggctgtctttataaacttttactttcttattttattataacaccaaataattattttcgcccaaaaccgataacgaacgcatagaaaaggttttaattgattaaattagtaattgatagaaatggtcatcattcttaattattaaagaaccctcatgtttccatcaaaatgtttaggatacaataactaaaactcacaaaatggttgtcagtgattagtttcatcatctcgtttcgggatcgaaaaaatgatttctactgtttaacaaaaataaatgatttctactgaatgcttataagttataatcattttgcaagttgatacggtagtatttcgataccagtgtaacagtacggtattaaaagagaaaaagaaaaaagaatctgcaaatattttgattgaacgaatgaatgaaatgcaaaatgtttcactttacattttcgctgtttcgagtggttttaactcttcttttttatagtggatataatagaacatattttgcgatcttggccattccaaaaatcaggctatacatgaacatttatataaacatattagacatcttttatgagttcttataatggaatttatgctcgacaagagacatctagtgataatataatttttctaggttggctggattttaaatatgtccaaagtccacacccaaatgtcacgacaaacaaagcaaccgtgttcctttctatgtttattggcttagtttgtttcattatagctatgatagtatttatttatttttaaaattctgattataaaatagtactaacgtgttaatacgagttggattttgctgagtgttcgcataataggttaagattaagaatttcatcaaaaccggatcggatgcagaaccccatatatcactaccaaaaaaagaattttatatcatttattttgaatatttgtattacttatgtcatataatatattatcgatgcaatatatagttgaatatcatttcatggcgggcgtcaatagaagagatggagctcacttcgataagataatgtatctcaagaatttaagaaggaaaatagtttggtttgcctcaagtttattttcttaaatttgttgtctttaaataatctctcgttccttcaatttttaaagcagacggtctcgttcttttgaaattttgttccctctggatttggtaacccaactaaaaagtttattctaaaattttattattaatgtataggtgataaaagagaagtaataaattgggctaattgttttggctaaaacacttctatatcatttcaagagtttgaataatcaaaatttggagaaaatctaggccaacacaggcaaataaacgaagttccaacatttggcggttaagagaatttgtacaaccggctcacaattcctctcttagatccgatccgatttgttccgagaccattatatccgggtttacttcttttgtttgttaacttctatgaagctttattgatttgcttttttagtctatatgggcacaacatgtcagtttattatcccaatgaactctatcgtatgagaaggagactcaatctcaggtgaggtggtatcaatttatgaacaccagtagatcacaatcacagtcacttctctagtatcttgcttttaaaatgccatttctactaccaaaaaaaaaaaaacatgaaccgtatatatatatatatataatttcaccttggatccaaccaattcaaacctacttccaaatagattggatatctgttttattggagtgaattggattagatttaagatatcccagttaagcaggttcatgaaataatttaaaagacaaaaaaaaacataaacttgttctgtaaaattttctaagagtgtaactctaatttcttgttatatatttttatattcttgacatattcatatatgtaatccttctgatccaaaattttattagtagattctgtatacaaactcctaatatatccgattcttcaaaacggattaaggatatttttaaataaatataagtaaaaacattttatttttatttttgcaacaagtctattattggtagtagttttagctgcctgaaacttttttttttttttcgtctataaattgtaactctcgacttgactccgatgtatggaactacaaaagaaaaaagaaaaacgtattcgtaattactacattacgaaccttcctttaattatatgacggtttcttaaaatatggatggttcaaaacaaattctcactaattataacgattatattatgtctatattaactgagagttgctttgaccatcattatattagaagaattcctctatctgtaaattcagacattttttcaatctatatatacactaatatttttcctaaattagtatatgtttatcattttgatctatataaaaatcataaaccttaaattctcttatagaaactttacaaatgtatcataaacaattttaagttaatcaaaaagtcatatttgagtaacaccaaatttcaattccctttagaaatttattaataaaaaataaaatattaaagtacaaaaacttttaaaattagttagcatacaactatacaataaaaaaaaataaaaaaaatatcaacatcaaatttgtgtcccctagacaatgaaagctcaaaactacttaaattcggctcctttcacctccactctcttcttagcacacacacagagaccttaatccatttctctctctccctctctctcattaagaaaaaaaaagagaatcagagaagaaataaaaagaaagcaactcaaatctttaacctacaaaaacccagatttgttaactctctcattcttcttcttcttctcaacaacatttgatctttttgattctcaaagtattctcaaagtaaaagagaaacacactttgttgtctcaacaagcaagcaaacaaaacccatcttgggaaaatctcatttctttcccaagaaaatctcattttttctgttacaattttttcctaagaaaatgagagatttggtgtcatgtttcagtgagaactcaataaacgtgacacatcccttatcaatatcatcttcatcatcatcatgttcaaaatacagtaccaacaatgtttgtatctcaccatctctcataccatcaatacaaacctccattacaagcatctacagaatcactttatcgaaacatctcatcatcaaagtcacatggtgcaatccacacaacaacaatggcttaagcatctctgttgcatccgcagatcaaaacccttcaacaactctcaaactcaacacttcttctcgtttcttccgtaagaagaaaggtaacaaatcggttgattccgatctcggtaaaatcgaggttttttgggatctttcttcagctaaatatgattctaacttgtgtggtcctgaacctatcaatggcttctacgttatcgtcctcgttgatggtcaaatgggtcttcttcttggagattcatctgaagaaactctccgtaaaaaaggtttctccggcgatatcggtttcgatttctctcttgtttctcgacaagaacatttcacagggaacaatactttttactcgactaaagtaagattcgttgagacaggagattcacatgaaatcgtcatcagatgtaataaagaaacagagggtctaaaacagagcaatcattaccctgttctctctgtttgtattgataagaagacggtgataaaagtgaagaggcttcaatggaatttcagagggaatcaaacgattttcttggatggattgcttgtggatctgatgtgggatgttcatgattggttctttagtaatcaaggagcttgtggaagagctgtgttcatgtttaggacaaggaatggtttagacagcagcaggctttggttagaagagaagattgttaagaaagatcaacaagacaagcttgacttctctctcttcatttacgcctgtaagacttgaaaaacattataaaaaaaaaactcaatttttttttgagatttacaagaaaaaggttattgattgattgattctgtttttaatatttgagatatttttatggggttttttttttttttgaacttacaatttcttcttgggaggagtatagattttattttctttcttacattcttttttttttttggttggagttgtgatttaatattgagagattccaaaagatgtgaatttcttcataggagttgttgttttatttttattttaaatttggttttcttacaaattcaagaacattgccatatcttaaattgaagtcatttgttgggaaaatatttgtctcaatgactctctttcttggcaacattatgatgtttattactatgtaggctcatctacagatatacgtttttttctttcataaatgttgaagtaattgatgattatggttaaggaagaagaattgaagagtgtgaaataagatgagaatatattggggcatatgtgcacgcctataaagatatgcatggagcctctttaaagtacaaaagttaaaaggtctagaatctactcatgctaatttgtttttcctattaatctaacaaaatttgtgaatgaagtaaaaatgtaaaatgctattttttcttttggttttagaatatcagtatgtgaaaatttaaggcatagtttattatgttttcaagttccaactctagttaggttattttggttaggaatgtattaggtgattaacatctcgatcattcaaggaacaatttcttcatggtttaggtgactacattgtaaagtacaaagttttttctttacattttttgttaaaattgttgtaagaaaatatgtctagtaatggctaatttttagttaagttggttcggttaggcgaggtttaggtggtgacatcccattcaagcaaatattttttctagattggttgatttggagagttttaggtgatgtaagtagttcaagctttagttttagaatttgattatagtcagtccgaatttatgttttcatataagtttgagttttgataaattggagttaactatttaatactatagaaatttaggagtattaaaatgatcattgcatgtaaatatcatacgattaagattaaccatgcctctgtatttaaaggatataagtattactataatacaataggatacaaaataaagattcggtcaacataacattacaatataattaaaatactgcttcgagtcatttaaaactaatccagaatttgaaaggctgacaaatttaccattgtttacacataatagaaatttgactgttaaacccatatataatgaacaaagctttaagagagagagatatcgatagcacgttttcacacaacacgatatataaattaaaaaaccatgtatgatacaaaatgtaatatgtgcactatggggtgcctggacattcattaccatttattcatttaagtcactaacaacatttgcattccatgaataattcaggttgcatattataaacaaatatatatctaaaccttagaaatatttcaattggatgtttcatccatataacattaaagaatgtttcacatggtatcactaattgcaatttgatcatgaatttataataatttataaaacaaatttggttcatgtcatccctctccacttctattatattttctcttaacaaatctcaaaccagttatattgataagccattcagatttacttaatttcgagcatatactaaaacaatcataatgcctgttttactctttcgagatttttatatcggcaacttagtcaaaacaacataaagaattaatagttctaccaaagaaaacataaagaattttatagaatgaacatgatagcttggtgaagatgtagtaggtttatggtaccattttcgaactatgctacaaaaatattacattgaggtaaggtgatccactataatccttatcatacatccatagaaacttataccaagttacctaccgatgacaccctcatgtatttgacccattactctttaacagattatatatatctttcaagagtgtatatcttattttgccaattttattctagtagcttgttatactctttgtgatattatgaaaaggttttaactcaaatatcatgaacttccaaaatctccacatatatttgtgttttttccctatattagagccattcttaacatttgtgacaataattttcaaatagtgatgattagtgaacttcaccttacaaatgcatttgattgaagaggaaatgtcattagccatcatcgcctttgcaccctcgaatgattcaagctttatgaaccagtcttttgttagagtaatctgatgtgtacattgtgaatttgtgatacatagttctatatggaaaatcttgtgttatacatatcaaattattatgttctctttcttgaaccctttccaatccaacatgttctcatttttacttgaacttatatcatttctatattttgtttgttatgtgtacaatctatcttgaaataatcaatggattggcatattcaacaacctcgttttgatgtctttatccttgttattatttttactttgagaaccatatgagttttttttttaaatacactcttcatttcttttttaactaatgtaaaatttcttccaaaaaaactttacaataaatggagcatttgtttaagcgcttttaacatatgattatcgaatgaaaaaattagaaactagcttctttcttgtcttgatacaagccaaaccgaaatacaaccttcgtatcttctatcccattgctttcgtatagaagatatcatgttccaaacttttgaatctagtcttcatactgtcctaaaagcttttacgtttgaaattaagttagaaaacacaatcaagtattacgagttttctaaactcaacgcaatcttaggtcttgaaaaatatacttttaggaattcactatcaacgtagttcagatagttacaaactaaagagaatacgaattctctaacttaatatatcttccattaatgaaaccaaagcttccctctcacctaaacgtctctcctaagaaacccaaacctcacacttattaatctccttaagaatatcctctagtcaaacattctattttctttcttattttaattgaaataaaaagataagaaaaaacttaaaagggaagggtgatacatgtgccacacagtgtctgtattgctttcactcccttcattagtggtcccttattgtcttacaatttaattttcgaatcaaaatctatcagccctctcccctactagtacttgtatactcatccaacaagtactcttttgctctgcaaatatttatttctccatatactccaaacttcactgccaaagaatcataacaactgtcttcagtcaaatgatctcttacaatatcataaacaaagtagttgttttacaatttaatctcttagagtaacaaattctagtagaattaaattgtttattaacaatttttaatttttaatatggaaattaaaaatatagaaaatagatttttttaaaaagataaagaaagaataagtaacggtatctctgaataagagtagcattaaatttgcttaagctcctcacatggccctgcatgtgtcctttgtaaatgttagtgtaccccatatatataggcacacaaccatgtcttttatttttatcctttgaatttaacaattttttataatgaaaggagaactttcctcgaatacaaatatacaattataattatagtaattggtacaatgccaaagtaacattaatgtgactatacaattatttagaaatagtatattaattggtacaatgccaaagtgacattaatgtaactacggttcagaagtgacatttactctacatatccctcagttctcttttgaaaatctttaacatcatttatttttcagtcagtcggccaacacaatttttctatattattctaaaagtcataaaccgaataccaagtttacacaaattaatacaattagtaatctagttttcattttgattctataactctagaagtcataaaccaaataccaagtttacacaattaatacaatcagtaatctagtttctatttgattcgataactctagaagtcataaactaaataccaaatttacactatataataaaattagtaatctagtttttattttgattcttaagaaaaaaaatatatatacatttcaccgtggttaagtaaatactcaaaatctattgattatatattttgaaggtgtataaactcaatgttttttttttaatatttgaaattacacgaacatatagattttttaaaaatatcatccatgctatatattaatgcatggatctcatggatttttttataaccaaaaaaaattaaaccgtaatccaaaataatctatgaaatttgtcgaagattcgagtttttttttttttttttttttctatttgaaggctaacagtaatcaatcataattaaaatcacacaataatggaaaaatctctaaccaagacccacatcataaattttcaactaccagaaaacaagaagttgtttaatcttataatatcttacattgatagtcaccaatagactagacactgcaattttgagattggtctcagtctggagacaaaaaataattcttcaaacctcagtatgatatatagacactaaatgtcgacatatattgatcatagattcatagaaagtctgtaaaatcatgatgttaggttttacattataatcattttatggtcacttcgaacaaacttttatttatggttgagtcgttttgaagcggtcaatttctagagtatactaatgtggtaacgtaattttgttgcacatgattgagcccccgtacgttttgtcaaagtttatttatgactgagtcattttttaggaattttctattgtcaatcatttgagatgtaagtttcaactttcaacgatacatacataagtattatagtctcaccaatattacatacaaattacaagatttgagattatagcaaagctaaatatatattttaaatgatttttagttgaagagtttttaataaacgaattacataaaagttttatagtggattttacttcaaataaaattgcaataattaggatgaacattatgcccttatggttacaataaaagtaaacgtatgatacgtgtctattaaagacatatgaaggatattaaggaccattttttcttctttttttggtagagactctcatattttatttacttctcctttaatttatctcgtgatctctttttcactttacagcaccattcctcccctatctctttggacaactgttcctctctttttaccttttttgcaacaaccaaaatatttctcaattgtttcaaaggtaactcatgattttgtcgattctgacacataattaagcaaatgggcaataagttattttggcttcaatagagtattattctatcaagaaactgttgtgactggaaaatttggaaatgcaaaaaatcgttaatgtgttttgatgggatgggtccaatctttgacattataaccttttcatgagctatttgaattcaaatgtcacactttgatatataaatcaatttacttctgcttcttgaacttctctgtttttgtaagtttgggagtttttgtgtcgagtggttctcttacgatgcgtacggccttgtttgtgatgttcccactcgtgtcttcctcttagtatcttgtttccacaagcctgctttcaacaaacatgtttcagtatttagggatgacccatttgagttttaagggaaaatgagagatacctcgcaaacatattgagtccatagatctctttcaatggactttcctgaagttggatcccgacccgattcggtttctgtctccaggaaacacctgatgatctctgaagcaggtttaaccacttgcgcattccatgattcttcagatttgcctttaaagaacaaaaaacacaccaacaagagaaattttaaagtttgttctccaagtggctagctatatggtatttgcttgaaacattgatgaaacacataatgcatacttaatatgtactctgttgcatcaatgtaatgaatattccagccaaagaccgtttctagccgactaactctccttttctgaaacacaacataaaattaaaatgtatcagaactgataggtcaattccaaagtttgagagtagtgcattaaggacttacttgacgacgaaggagccttctggtatttaacttcaccctatcaattgcttcctctaacataatcctcaacttatcatcttttggaaaattcagaatcttcctcagattctccttcataaccttatcatcgttacttaagcttgttaaatgaccagcacatgtctccgagagatgtattttcaggaaatcttcaaactctctgacacctatggattgccttaggcctctagtatagtcggctcctggtttgtagatgtcatatacttcatcaagtagtccagcatctaccatagcatctactctttgttcaacatatctgtccagtactgcagtttcagcgtccatgcatatcaaacagtaatcaaaacgagatgcattgatgcagccccagttctgccctgccgaaacacattagttaattaacttctcagagcagttaagcttaagggtcatcaatactctttaactttaacagataatgttctacctaagagagatacacacatctaattgcatatttataaaatgaaattaaactcgaggttaagaagaaagaatctacctctgcagtctttccctgatatagcttgcttggaagaactcctctactagcatgcaagctaaggtattgattaatctacaaaacatcaaaccagagtgaataaaccagaaatcgcatgaaattgtgtaaagaccagcgaagcaacataaattcaggatcattgtctatctacacggaagaaaatagcatatcataaatctcacttttctgtgattattggggtgaattctgttagctgccacaggatcaagctctttaagaagttcatagccatggctcaaatcatctctcccaaagacagactcaacaaccatgtcctggtcaaccactgtcggcataaaatttcttattatccagttaaaagatatccacaaaggtgtcaagttgatagagatcctagatacctgaagcaacatctgcacaacactcctcggtatcctctgctgcatcgtcaagaagaaatttacttacaacagcctacattgaaaacatgaataagataagattaactgcgttagcaaggtaaattataaactggtctaaccacaaaaccaacattgactagagcagtaacaagatcacctgtatataataatgtgttcctccaacaagaactggaatgtgattgcgagaaacgatctcctcaataagctgaaacaaatcaatcacaactatatcataccaaccaaaccatcacttagaacgtgacttgtccatattacaaaaaccatatgaacactcatataccagtacatagcagctttaatttgattacttgaaacacttacatacaacaacaacatcacaatgaacgtaagatcctaatcctaacgtataggacttcaaaattcttaaatctctctctctctaacacaatcctccaatatgattatcagattcttaatggaacacacacaaaaacaaaaacaaaaattgaaacttcaaaacaaaaggaggtataaatttgtactcacaggaacagtgaagtctcgaaaatccctagctgtgaactccatatctgagctcaccgtcccaagtaaatgatgaggcactcctaaacacaaattcccaaaatcacattaaaaacaaagctaatcaattccaattacactgacaccaaagtcatctctatctacaataaatttacaagatcagaacttccaaacctttttgttcatcgacggtgactttattggtgagaacgtcgagaccagagtatatctgcattgcgtcggcgttaataatctccaccggaaagtgagacgccaaatcaacggcaagctttgatttcccagaacctgttggacccattatcacaaccaccttcgccttcttcttcatcttctctccctcgattccgccattgctagggtttaacatcatcatcgccttcgtctctctctctctctctctcttcgccgcaccgatttatcaattttaaccggagtaaacagagaacaaaaataggtccggtttataactaaatcgttttcaattcactttggttttggttttctaaccgatacttgacatctattatttgaaaggcccaatgaaaacttagcccaatacgtgttattcgctataaatttatttcctcttgttttttgccttttggtggtgctcaaagctttaggtttagggtttttctgcaactcttgtgtcttcttggcttctacacttgactacacaagcaaacgaaaatgttctgattgtgactgttttttaaattatatttgtagaagacaaaaaaaaaggagaaacttgatcttgaatcggatatcatgaagaagcctaagtttcttagtttgcaagaagatgatacatttgagaagatgagacaaagccgtcttcagaagaataagaggaagagagactcaggtttgaatgtttttgaagaggttgtgaaggatcttacttatggttatatgaagattggggacggtgacgagatatacgggaaacacagaaagaaaaagagggtttctaaggctaaagagcttgaaatggcgatgacgttagaggctttgaagaaagatcaagagaaaggggatattgttgcgaaaaatcactcgtggcaagcggctataagcagagctgctggtatcaagattcatgatgatccaaagcgattgaagaagagaattcacaaggaaacgaagatgcgtgagaagaacacggagaagtggaaggaaagagttgacgtgcaacagaagtttagggcagagaaacagcaaaagagatcagagaatgttattgataggattcaacagaagaagatgaggaagattgctaaaagagagaaaaaactcttgcgtcctggttattaatagtttcatctattcactgagttctttaacctatttgagtatgtttctctgtttcactatacactggattaggaaagcttttgtaagaaattttgatagaagttaaagtttccggttacaaaactcgaagggtcaggaataaaacattgtcacacacatgaaaacaaaaaaatgtgagatcatactgaatctttatcacatttctactaaggttactgaatcaggaaaacagatttgatcacaccaaaaagcaaatatcgaatcaaacaattacaaagagcagaagaaagaagaaaccaaagctggctgcttttgcagcctttattgttatcattttgtgttagcgtagcgatatttcaatgcttttgctgagttcctccagctttgtcatccgcagtttctcgctttcggtgaccagctgaagaaacacattttcataccaaaagatttcagaaaacaataatcattttgtaaagaaaattacaaatggaaacagaatgtttcacctcaactagcttgctaacaaatatagctttctctttgttcttttcattgtaagcttcaagtgcttctttgaattctctctcctgtgacaacaacaacaaccaatggtctcaagaatgtgcaagaaagataaagagttatgaacattaacacaaacattagtttacctttctctgacaactctgtcctaaaggcttgagttctcggttaatagcatcgactcttttccttatcgcggatatctcttttctcattggatcggtaagagcttcaagctcctgaaaatgtacaaaccaaaactctctcaaaatgaaaatctttgttcaagttcttgaaaatgttacaaaccaaacttacttcccgaatctcggctaatcttctagtagcttcctcagcgagtccaagctttttctggaccctatccttaacctccatcttcctcctctcaatctcatcttcctttgccttaaacaaagcaaaagcagactgtgaaagctcctcttctttctcatcaatcataggactgccattcatgctaatgttccccgagctcttgatacgttgaataaatggcgattgtggctgctccaagatctgtcttgtcgtagccattgttcctcagatcctttttctcttcctcaatttacatgagcaccaaaagggagatgccttgttatataacccaagactggccttaagagcctatcaagacttgttaccgatgtataatgacaaaaatgccctctcagtcaaccacactatccctgattaaacatattctaaacttatttagagacttagtagggcaaaatttgaatcagaaactaattttgtatgaaatatattaagttggttcatagaaaggaaaaacatatagtaaaaaaagaataccaagtggggctaaaaggtcttgtaggttaacatgtttatattgaattggtaatacaacaattttcttgagttggtgtattataaataggtagctaaaatgttattctcattgtttggttctcaatctataaataagacaaagatacgtatagataaagtagggaaatgtatggattagatttagaaaaaatatgttaggtgtgaagttgaaggcaaaacagaaaacaaaaaaaagaaagatattacaatatgcaattgagttttcatgaagaacaaaactgagaataacagatagatatataattctttttctttacaaaagaaaaaggctaataaagatgttagagtgcttgtaattgaaggcttcttgtaatgtggaggagacagtgaaatatggagttgtactctggctgaaacttacgggaaaagcaatattgtatatcataataaaatagaaactattttgagcaaaggcaagattcaaatcctagaaaactttttaatgttcaatagctaaagtgttcgtgaccacaaatgttcaacgcgcattcaatgggctaaaatgattttaggcccaatagtttagtttaagcccattttagctccttccatatctcacaccttcctcttcatttcttcttcaccgagccatttcttctgtaagcggatttcatcagcattcagcagccagacgaaacttttaacgatctaccatcgaaccaggtctctcatatcttccgatcatcttctccgattacgattctttccttctcgtttttagattagctcagaaatttttctaaccttttcttctctgtcgatctaacacctgacctcgatttttcgttaccgataccaccattttcgaggtcagagctaccgttttcgtatctgtgttatcatatccggattaggttttgattttatgattacatttgttataatcagtgatttgttgtttattcgcgatcctcggattttcgctggatgatcttttgtgcttcctctatacgttttctaaacctagatttggatcgatttggtatatgagaagctgtgtttgttacactgttttttgtggtaacaaacacttaacattctacagcctccacaaggatccatgagtatatgtattttgatttgaatgtagtagctgatacttgggatacagtaatagattttttggtgacttccccattgtatgaaatgatgatgacaaaaaggattttgagagacaagtaccaataagtgtttcctcattatagattttctgtaactgtctgtgtggaatcttgagattacctctagcatcgctattgtgctgtagattatgtttctgttaaagtaattcaccattgtcgctgatacgtgggatacagtaatagttgacacttgatacattagtatcttaattcaccatgtttatttagcaaaaacaaatttaccatgttatgattgatgatgacgaaaaggattgtaagagtccaatgttactccttataggttttctgtaatagtttttatggagttttcaaacaatttcagggttttcaaagtgaacgattttgttagttcctagaatctctctcattcactgtctgctttagttaaaatgagtttaatgttttatgcacaggatacttcttcattaccatggcaacaagaaatgctttgagaattgtgtctcgtaggttctctagtggcaaagttcttagcgaagaggagagagccgctgagaatgttttcattaaggtaaagatcagaagctttccttattgatgtgaacaataatagtagactaagaatcctcgaaaaaactataagtatatttactttccttttgtgatgttgatgatgaacacttattatcaagctcttgtttgattctatctgtctctgttgtaaactattagataatatttggttttacttataagaaacttatcttgtgtcttaatcgtagaagttaaatctatttgttatctaaaccttgtagcatctagcttgaactagaaacctgttacataatacttactcttttcaaaacaatttatatttttgagtaagtcatcttctgtccttatattttaccttgtttatggttttctacattgcagaaaatggagcaggagaagcttcagaagttagctcgacaggtaaataattcctttaactccagttgttgaaactacgaatagcttgtttagataaagagaaaatttacagtcttgtgtggctgaaacttcttatgaacttactagggtcctggagaacaagcagcagggtcagcaagcgaagcaaaggttgctggtgcaacagcatctgcatcagctgagtcgggcccaaaggtgtcagaagacaagaacagaaactatgcggttgtggcaggtgtggttgctattgtcggttcgattggttggtacttgaaagcaggtggaaagaagcagccagaggtccaagagtaaagagatagattgattgatggacttgtgatgagtgaataaaacagggagtagcattactcattcctcccttgtgagacactttggaatcaaatcttacgttgctgctactctctttgagtcttttcttttgtttttgttacttgacacagtttttttttgtttccggtttgttgacatttagtttctcaatctaaactccagagacttattttcgctctcttttgatcagaattaggtatatctttattcggataatccttcccatccaaactgaaattgttagtaccaacattttttttatcagaacatatctcgagtactgtgttgattggattcacatatcttatgtttccagaatctgaacaatacaaagagggaagagtctgttttacactacaccaaatccttactctagggaattcttctgtattctctttaggtttaattcttagtaagcgagtgaataagagaatttactaaagatcgttcataagtggactattgaagatgtaactaaggcaatagtttgaaatataaatgccaatcacaagtggactgatgtttgagtaaaaaaatctcttgagaatttcagcaaagtctaagaagatagtcgaatacaacaaactaaacaacgacataaagatttcgaaagggtacagcaaaaccaaatgccaagtataccgcattactcgaacaaactgaaacccatgtcctgcaaattgacacaaaacacacaacatgtgagccatcatttcatttgaagagataaaaaactgttgtcagaaagaaagtaaaacttacatcatcggattcttctttctcttctttcttctcttctttcttggactcagcagcaggagcaccaccacctcctccacctccagatgtagcagaagcaaccgcaacaccaccaccacctcctgatggtactgaagctaacttctcccttccagcagcaattagctcagccaagtctttccctttcacttccttcaacaaaagctcaatctgagaatcctctgtctcagcaccaactgcaaaatcaaacataacaattgccacactccatcaattcttcctccaccacaattacagcaatcacctataacaacacagtccaataccaacaccataatgcctcttattgcatcacactgttcatttccagcaaacatatacaattcctagttccaataacatttcaagttaaacaaattctcactactagaataatcatgtatacattccaatgctcaaatcaaagtcacgaacctgatccaagaatatccttgatatcgccagtggttggggaagctttcccgctcaagacggcaagcaaaaacgcagcaacaaccttcattttctgaagaaaaacaaaaacagatcaaaaatcaaacatagtacgattacgtaggagaagaaggagagagaaatggaaatggaggcgcttactgcggaagtgttgatggatctcgcaggaggcggagtgagattagggtttttagacggcgatggagaagaagtacgaaaaaatgaaaactatatgatttatatacgcttagggtttttaatcttatcaatgtatctccgaatttaaaattttatttaggcccagttctttcaagcccatatttatatgggctcaatatttcgattgacgggtaatattgatgttgagaagagaacgaccagattatacaattctctagttttattttgtttgatggatgggatttcacctctaacctcgtcttctatagcaccttcttggtcgatgacatcaaaagtagcttcaactctacacctgttgtttccgaaacatcgcctgcgtatggcatttctcggtatatgtagttgacaagtgatatgttttgcaagttactaataaatttgtggtgtcaaagttttagcatagtctagttattttctcatacgaattatgatgtatttacatattggacggcattgaagggggaacaattcaagactagaattttttttttatccttttcttacaataatactattcttgaagtcatacgtaagccgaatctgaatctaggttccaaatgaacgacaacgtatcattagcaaagtcaaggctagaggtatctcatcaccattcgagtcaagatttaagaccatgactaggaccaatgcttttgttggctactaaaaactccagagtgacaaaggcgattgagatagaagcagaaatgctaacaacaaagtgcaaatgacattcgggtcaaaaactcttgagaatttcagcaatgtctaaaaaagatgatcgaatacaaactaaacaacaacaacatatagatttcaaaaggttacaatattaaaagaggacaacaaaaccggacttttcatgctactaccagcttactcgaatagactgaaacccatgtcctgcaaattaaaaacaaaaacacacacaagtgagccatcatttttaggttaaatttcaagctactattaagatcaagacttttgttagaaggaaagtaaacttacatcatcggattcttccttttcttccttcttctcttctttcttggactcagcagcagaagcaccaccacctcctccacctccagatgtagcagaagcaaccgcaacaccacctccgccaccagacggcactgaagctaacttctcccttccagcagcaatcaactcagccaaatcttttcctttcacttccttcaacaaaagctcaatctgagaatcctctgtctcagcaccaactgcaacaccaaacaaaaacaacaatgccacattccatcaatcatcccaaactcattattgtatcccattgttcactaaatcattactcttaacaatacttacgcatctcgactatcataaacaccgtttaagtcgataggaaccataaaaatccctaatatacatatcatttcagcttaagcaagttctcaactatctaataaagatttcaaatcgaattctccagcgactcaaacaacgaatctaatcatattgtaatgaaatcgattgcgattcatcaaaacgaacctgatccaaggatagtcttgatatcggcactggttggtgaagcttttccgctcaaaacagcgagcaagtatgcggcaacaaccttcatcttctggaaaaatagtgaacagataagtaaatggagaatttgatcggagaagacgatggagaaattgaaatggattagtgtcgtttaccgtggagactgatagatctcgtaggagattgtgagattagggttttgtgcagacggcgatgaagaagtgaagaattaaggaagtatttttagtttatatacaattagggttttctctactttgagtctctccgggtttaaactattatcggatatgtttaatgggcgttggcccggttcatcgctaggcccaatattaattttaaaggtgatgagaaaatttctcaattcttcagtcaataaaaacctatttcttttgcaaactttataactcttgataataatgttcatataagtgaaatcataaaacaatattgtttgtgtaaacaaaacaattaatcttgttatcactaataaaagtgaaacaaattaaatttataattagtaaataaagtagatttatgctttttaaaaaaatcttttttgcagtagctagattgtgtctatatgtgtaatcttttttattttttatccttttaagtaagttagaaaaatctttaaaatgtattatataaaaacattaatggcattggatatgaataataattaaagatttacaaaaatttaccttttaatatatagtagatttcattccatttaaaatcatttatgtaaatgaatcttaatccgagaaaaaacaattatatcttgcatggtctagaaattatttaagcagcatcgttacatacttagaatcggtatatatctacacaacgtgtttgctccaccgtataggaagtttcacaaagaaaaaatcatagctaattctcgttttctgtctcaaccttgtcgatcaagtcatctcccatataaggtaaagcttattcgattgtttagcaatggatctgaagaagccgagtgctcgaggtggagatgataagcagcaaattgttggcgatgaacactctagacgtaataagctctccgaggaagacaaagtccgttctcccatttgctgtatgatgggtcatatcgatactggtaaaacaaagctgttagattacatcacaggaaatgtacaagaaggcgaggctggaggtaccactcagaagatgggtgcaacatatctctcagcgagaaacatcctagagaagaccatggaactgaaatccgatacaaaacttaaggtgccacgtccactgtttatcgatacacctggttacgagttctacacaaatcttcgctcaagaggcttaggtttgtgtgactttgcaattttggttgttgacataatgcatgggttagagccacaaactatagaatgtctaaatcttctgagaatgaagaatacggagttcattattgcattgaataaggtaaaactgtttgtgatttgttttgttctatggtgtaaatgtttttatggaaaataaaattttcaatgtacttataggtggataggctatatggatggagaatatgtgaaaatgctcctatcttggaggcgatgaagcaacaaactaaagatgttataaatgaatttaacatgaggctgaatgaggtaagttattcatctagagtttatcatcatctatgggtttgagctatcactttgtgtatatgttgtttcattggtattacagattataaaccagtttaaggagcaaggactcaacagtgagctttattacaagaataaagaaatgggagaaacttttagtattgttcctacttgtgctattaggtatatgagtctctctttgtttattgtttgtaatttatcctaaatggttgagtaattttggttcttgatatttcagtggggaagggatcccagatctattgttgttgttggttcaattgactcagaaaacaatggttgagaaactaattacatatgttgacaaagtgcaggtcttgctccttttctcttttaggtaacacttgtttgtacaatacttcagcatgttggattctgatcctttcttgaaactgttaagcagtgtactgtcctagaggtcaaagttatggaaggctatggtacaacgattgatgttgtgttggtaaatggtgaactccatgaaggtggtcaaatcgtcgtttgtggtctacaggcaagtaaaaacttattatccaaactcaaataagtaatgcattggataatacttagaacttaaataatgatcttatatcttcttatattttagggacctattgtcacaacgattagagcattactgactcctcatccaataaaggagttgcatgtgaatgtacttattactgttattccttaagaaattatagttcatgcaaataccattacgtactttttctatacacaatgagaattcttggtctggtatttcagggtaatcatgtacatcacgaagtaataaaggctgcagagtgtatcaatattattgccaaggtgattggactgatactacattaatcttaatttctagtctcttttaattaatgatcacatcctgaatattattttccattttttggttgtgtttaaaaggaccttgaacatgtaattgttggtactgccctgcatgtcgttggacctgatgatgacatcgaagcaattaaggagttggttatggaagatgtaaactcagttttgagcaggattgacaaaagtggtgaaggagtttatatacaagcgtctacattaggttctttggaagcattgcttgaattcttgaagtccccagctgtaaagttacctgttggtggtattggcatagggcctgtgcaaaagaaggatgtaatgaaggcgggagtgatgctcgagaggaaaaaggaatttgctacaattttggctttagacgtggaagtgactacagaggctcgtgaacttgctgacgaaatggaagttaaaatcttctgctctgatatcatgtatcatttattcgatcagtatcaggcatatatatgttgaataattggtttttttaggagctccaaccattttttggagtcaaaccaagttcttactaaaatatgtatcatatttaaccagattttgtttgtactgaatgtacgagcaatttaaacaaaacaaaatttagagacaaaaaagtatattcattttgcgtcttcgttttatgaatatattttttttataaagaaattatgtatatacttttcaaagttcttattgtattgtatggatacaattatgaaaacaagtggtacacttgtactgatccaatattaattcgatccgccgttttgcttagaacagtcgacatgtcaaatctacttttggacattcttagacatcagatggaacaaagttgtcgacataattgtgacctctcagtgggattggtgaaatcatgtgatcaaacatcaatacataactacaccggcaaagaatatctgatgtttatattgttacttggtcatattcataggtatcgagatattatcgtgatcgtgatcggcataactcaaaagtagattagagaagatatatattaaaaatgtggactatgtgaaaattgtaagattgttaattagttagccgtctttgtcattgcttaatttacaggatgcttaataataaggaccactttaccaaaattgattccacctctacatccaccacgcacttcacattttcaacgtgtctcttttcaatttctcaatcacatttctttatgaataaataaacccacgggccgcaaagtcttacaattccatatttatctagttatccaaataagtagcttttttcaactgtaacgaaatgtgctttattttgtaaattggacttagaccatgtttaataacgacaagatgaaggcaaaccagagcctctagctctggtggtataggaccctcagctgagatacccgccatcacgagttcgagccccggtcactgcggaattcacatgctgcagcgtttcaggagccgacacgtggagtgccatttggccagccacgtggctagtctgagcgaaccgacttgtcgaggactgttaggatatctgggttatcaaaaaaaaaaaaaaaaaaaaaaaggcaaattagagattacaaacaacaaaaaaggcaaagagagcaggggaagtgtttgtaacatttcccaccagaattcgaatccaataaatcatgcgtaataatgatctgagttatggattgtgttttgtcgacccactgatatcaaaaacaaaattgtataagtatataaacaaataaacaaacgttaactaaactttttttatagttttcatgtaaactatttaatgaattttttaaactcttgatttataatatgaatgtagtcataatttattttaaaaagtaataacaaaacataaagttttaaatacgttatatataagtaaattatgtgagtaattttttcaactttttatatgtttaaataatgtgatttataatgaaagtagtcataatttattataaaactaataacaaaacataaaattttaaatacgttatataaataaatgatgtgactaaattttttcaactttttatttgttaaaagaatgttagcaaacaaaattccacaactttttctcaataatttttcaaactattgcaccatttagaccaatagggtatgtgatataactatatatatattccatgttctaaaatagtttattagatgccacctcatgttaaaactatgggcaccaaaacgacttcaacattccccttacatatattaatcatgattctttaagtcttttagatgaccaagacttactaagagtcaatttatttgtgggaatattatgattgtgttaatatattatgtgttttggaaaacaattattttgaaatatcatgatcttttaaagtggttcttaataagatattcataaacaagtacatggtaacagtaaaaaaatttggttacgttatgtaatagtacaatgttatattgatcgtcctaattttgttcttgaccaagtattaatttggtttatattatttacttagatccataaatttttgtgtggggattctaaatattataaaccaacactcaaattaaatatgattttatttgaggttgtacttttaattataaatttattttcatgttatatttaaataaatatattgttgtttttctaaaaatcaaatcataaattaacactacaacatgtattaaattaaaataatccgttaccatactttatattttaaattaaacttttgcgttaaatgttttgtgtgagtccagccattagaagaaaaatcttctacaaatagaaaacatacatgtcgaaatcgagaaaacactagtaagatattttcatggatttcccaacttttaattcggtagataaaaaaaaaaaatacgaacgtactttggtcagaaaccagaaaaaaaaaatcagaaaatagaaagatgttttttggaatgtctggcctaaaataaagatatgtgtcactatgttactttctagctcattttcaagtgaaagagaagatgagcagtgtctttcgaaaaaacgagagaatctctccgagggattgagaaagagtttttcttaaaatcaagataaattgttgatggaaagaataaattttttagtaaaaatgaactgaacttttaaaactatttaacaattaatggttatctatctaattatccaataaaaactcagattcttcaatccgcaatagtaatcactacattcgtatatatatagtatacacacattcgtgtgaaataagcaatgttatcataaaccatcctcttaacttcttaagtaaactattcaagtttaccataaatctgaacgcctttcttgggtcaattacgtaatcatattaactttaagcattatacaattaagattccaaagaacttaagacccacttggctttgctaaattaaataagagataatggtacacataattgttgtcaacaagtgtgtttgcatgttaacaataattggtcagttagagaacaaagactctatctatggttttcattaagtattattatatatcttgacttaatgcttttatgagtctaactcctttcttggatcataaccggcaatccaccgttaaccgtcgcagttaaaccaggcgcaaaccggagtgtctcggttgtttcgggacttgcgacccgtgtttcgaacctcctaatgattgccacagctatggatttcatctccatgatagccatctctttcccgatacaaaccctagctccggcctggaaaaccgggtacttaaccggattctcgggccggaacttaccttcgttatccaaccacctctctggtttaaactcttcgtaatccgggccccagatccggtccatccgacccattgcataagcatggtacgtgactctagtcccactattcacaaatgtaccatcagacaaaacgtcatcgtttaaagcgaatttggaatcgaattgaaccggcggaaacaatctcatgctctcgtacagcgacgcatgcaaataatccatctctctcatttcatcgcaacgagcagtgactgagtcaaaaccggtccccataacccggtccagttcttcccggatccggttctccacttccggatgacgggtcaataaccagaaaaatccggttaaaccagcagctaccgtatcccgaccagccaatagaaaactcacaacgatgtctcggagatactcatcatcgtcctccgccacaaccgccatgaatctagaaatcaaatcatttttacccatcaaaccggttaacctccgttgcttgattaaatcaccagctaaccggtttatcacattgatagattcttgaagctttttctcagaaccaattcttaaaagccttttggttttccataacagaggaaacggagctaaagctcgtttcgccgataacaacgacgccgtatcgaaagcgacggcgaattccgatatcggaaaaggtaaccggagacaatctgggtcaaacccaaacgacaatttactaatcgtatcaaacgagaatcttctaaacacatcttgtagatccaaaacagaaccaggattgtcggaaaacgaagtcaatatcggaagaagacgtgtctcgatctcggtcttaacaatctcatgagcgaaaactcttacagaaacacttccaagttccaaactcgcgagttttctctggaaacgccacgtgtcaccatcggaattgaagattccacggcctaaaagatcaccgaggataacagagaattgtttgccttttgggtaattgtggaaattggttttgaggatatgttcaacgtttgatggattcgctgtgataacgctgtttaagacgtgtactttgatcgttgacgtcggagaccgccggagaagatgagtgtaccaatcactgagattgatgaagtcttttttccagcttgaagtgagataagcatgacagatctcgcagttgcagtaacgtagtttttgaaggaagagtaagtgaaagagtgagaatattatgatgaagaagaaggagacgatggtgaatgatatgattagtaacattgttgatgaggagacaaagagaaagagagatgatgtatgaggaaggtgagaggaaagagatgagtttgtgttatgagaaaacttttgagtcaattaaatagagattctttttttttttttttttcttaatctcatttattctggacagagacatgtgttctctaatatttagttaaaacatattttcaagaccagaaagtgaagagcgcagaaattaacaagaaatgttttgaaaacaattcatgtgacaaaaaaatttgaaggttttttgataaagttaaaaaacagttttgcattattttgatctttagattcctcattttcagccaacaatttcaactttgtttatatatttatgttgtcgacatgaagtaccttaattatatcgacaaaaagattctttatttgattttcgtacatacgaaataagactttgtcaattatgattatagatgtcttgcattattttgttgggtaattcagatacatgactataatattgtgatagttgattaagtaaatgtataaattttaaaagaaaaaatcaacattaaaatgaggtgatgatttttaaaaacaacattaaattgaggtgatgatttttaaataacatgttatgttttctaaaacatgttatgatgagtaaaataaggtgctactttccaaaaagacatattattttagaaaatagtactagtactcattgttattgtactagaagtctaaaatcatttacctaatctaatagtactactaaatatttgtggtaatttaatacacattcatttttgaaatgtatccttatttttttattgggacatgccaaaacgttttactatttagtcgattatcaagattatgaatatatttttttaaaataacatatcaaatacagtatacctttaaactactattaccagattttgtatttgaattagaatcaattttgttgttttggtaaattgctggttgaatatgctgtaaatattataacatttaagtgaccaacaaaatagaaaaatagtagtaacatttaatttgtaagattttacttcaaatgccattaatatacttcctatcttccattttctaagttatgttttgctaaaaacgcatatttaagaatttttgtttcaaaatgataatttaatattttaatttaatcaactcaacaaatcatagaatactgcatatacaaatgatcaaaaaaattaaatacataaatgttttgcaaaacatctgatatgagtgacataaaaagtattgactttatttatgttattagaaataacctactaagtaacatgataaaaataccccaaaaacattcttttgtggacgcggcgtaacaaaaatttattttgagggatctgtaatgaaattttatcaaatataaacataaaattaaaatatacttttgagggatcggcaaagaattataagaaaatatgaactgaataaaattataagatagtaagaaatctttgtttgttttttttacacgagagaaatattttatttttaagtaatattttaaataaataacaaattataagaaaattgtttgtattactgacatttctatgctataactcgaattaaaatttccataaattgaaaaaaatatattaatgttttaaaattgtaacgtctacatagacagttggagttgtgttcgttaacacgtttcccaaagttattcgtgtattttgctaactcatttccgaacggttacgttcaccaaccaagctattcatgccaattttttaatctagttactattcaaacaaaatgccaaactacaccaaactaatggccaatattttttatcgatattaattacatttataatatttataatgttcaatcatacttttagtgtaaagtagattcgaaccttaacctaaaacataataaaccttcaaaacctaaagaatcgaacaatttagtttgaaccatgcatcaaaacctttttttgtttttacttgtaattgcaaaataattatcggtgtatcataacaaaactatttggtaaacttgttttgatttctgcttaaggtaccttcacgaagaagaaaaaacaaagaaaaaaaacatgtgcttcatagaattaaacacgtgagtttaaaagacggtgttgaagttagcaagtggtcatgtgttcagagtatataaccgcaaatgggacattggtttatgcaatttgcatgtcgacacgcgtctctcatgcactgaactagctgtttccagttgacgttattagtcgttacttcgagagtcagaaaaaaaactttaatagcttcgacaaagccaaaataaaatgttttggttacccatttccacttgtagagagacttttaactgatatcttacaagtcgcttcgttcttgtccaatcgacatatttgcaattcgtatctattttaaagttaaaaagtagacgcctttttttgtaagattttaaaacatctttttttctagaaaaaaaaatcgtagtaaaaattaaggaataaagctaaattttaccatagtagtattatacttttaaaatttaaacccttttccaaataaaaacatatgttttcataactcataagataatttagaaatcagaaaaatcaataactaaaataaaaatgttactgccttacagtcttagacatttcctacatgaccaactttttgaaagaacatcataaattctaatattgcaatgatttacatcagcgaactttttttatgaaagaaaaacagattgaagattagaatatgaatgacaaatttagtttaacaaatagggattgttgatttggttaataaaaacccaaacataccttttttctaaatgtataaaatagtggtggttctaaaacaacaatctcaagattctctgataaatcatacttaaacttcgaatgattgtggcggttaagacttacaaatctgtttgagatttagaccttttttgtttatcgttcaaaaactgtaatatctattagtgtaaattgaaaaaaatagaacaatatgcggcgaacaaactatatatcaacgtaaagataaatttggtatgcataggtttactgcatactccaaaaataaaatggtttaatatgttagatgtttagtccattttgcacacagcatatattcaaagcctaaagttacacatatagaaagcgaaatcatgcaagatactctagatatttgcttttgttagcttcatcccttttatgatttaaaataaaattaaaattaaaaacaatcggcagtttgagttttgaggtcaaagtgatcgaagcgtggagggtctaaattaatttgggcctgaaaagaattagaggcccataagccacagagttattatccacttttcctcttccaccgagagagaagcgacagagtgaggccatgcctgtgtccgtacattccgttatcgccacgaacctagccactacactatcatcgaattaccggaatgtttctcgccgtagaactatctccacctctgtgaattgttcggtggagattacggaggctgatcggtcggtgaaactgaagaacgggaacgattcactggagatatgcagagttctcaacgggatgtggcaaacgagcggaggatgggggaagattgatcgaaacgacgccgttgattcaatgcttcgttacgccgatgctggtctctctactttcgatatggctgatcactgtaagtagctaacaagtgaaattgaatattcagaattgacttgaaattgaaaggttttgtgtggagattagtaatagaactgtgcttagttttgatcttgatgaccttcaatgtgtggagctatgttttggtcacagaagaattgaattgtgtggagattagtgaaatagagttgtgcttagtttgttttctatgatgttcagatggtcctgctgaagatctttacggtatttttatcaatagagttcgtcgagagcgtccaccggagtacttggagaagattaaagggtaagcaaatttagtccaattgattagaatttgtataagatatggtagggtggcttaatggttaggctatatttaatgatgtagtttgacaaaatgggtgcctcctccaataaagatgacaagtagctatgttcgtcagaacatcgatatatcgaggaagagaatggatgtggctgctcttgatatgcttcagtttcactggtgtgtgttactctcgtcgcttaattgctagtcgttgacgtttcctatcttcttgctaaagtaaacctgtgatgtgggaataggtgggattatgcgaatgacggctatcttgatgcactgaaacatctcacagacttgaaggaagaaggtaagcgagaggggctatatctttctcctttgttgtgattgtctatttgtttatctattgggctgctttaagtgtagtattgaaatgctttcagggaaaatcaagactgttgctttgactaattttgatacagagagacttcagaaaatcttagagaatggaatccctgtcgttagcaatcaggtgaatgtcagcccgatgtccgaacattatatatggcctttattcggactcttttttttttttttgtaaatctctaactctctgtgcaaactctttccaggtgcaacactccatcgtagacatgcgtcctcaacagagaatggctcagctttgcgagcttacaggggtcaaacttataacgtaattatactttatgaaattcttttttgatttctctctttaaaactgatttaacaacacatcgttggtctttgtgtgtagatatgggacagttatgggtggtctcttgtcagagaagtttcttgataccaatctaacaatcccttttgctggccctcgcttgaatactccatctctccaaaaatacaaaagggtaagagtccaatggccgttcttgttttatgagtttaggatggctgatgcatgatcatcctactttgtactgttttaagatttttgagagttacattacagatggttgatgcatggggagggtggaatctatttcaaggtttacttcgaacaatgaagaccatatccacaaaacatggagtctctataccaacagtggctgtgagatatgtactagatcaggtatttgttcttcctcacattactctttactcttaaggccaatctggtttttgatttgtcggaaaaatgaaaatatcatctcagcaaggagttggtggatcaatgattggagtgagactcgggttagcggaacacatacaagacgcaaatgctatattctcattggtattggatgaagaagatgttaatagcatacaagaggttaccaagaaaggtaaagatcttctccaagtgattggtgactgcggagacgaataccgacgtatatgatgtgtagctatgtactctatactgtatacaatatcatcaactcatgtaattacacttttatgtgtagaggaatcatttttacatttataagacttctctggctttatttcttttgcttctatgcatgtttggagagacaatactaatataaaccacaaagctacatgtaagctatagagtaaacatgtttaaggtaagtaaacatagttttatcataaaaaaaacttagcaattctttgattcaaaggaaaacttggcaaataccacttcttattgaaaaactagtttactaattattcagaggacatgaccaagataactatgaaaacaaaatttatgaaaagaaaggtttgacgggcacctagctcccagcacatcttcttttggaggtttcaccaccagactacttcacagctggctttgagtcaaacttggaacatactcaaacaaatttggcatagatgatgtgaatccagaatacacctgttcaactttattatcctctccaacaatgtatacctcttgtttgaggggaatagtgatagaccaacaggtttcctcgatgtcgagataatcttacatggcctatgtaaagcaggagcggatccatgttgatgattatgtggacaagagcactataacttatacatatttgattttatacagaagaaagtataatataaagtggaacattggtttaaaatacacgcaatattacaattttagtgtgattctaggcttttttcatcagatcaagattttataattcaacacaaaactcatgattctataattttcaatttatgcttttaatcacgagtatattaatattggcaccaaatttctatattttctcttctcatgtaggtctcgcatgtacgtacgccaagaaagaactcacgagaatggagctgcctacttcatttttttttccttacgtaaaacttaacgtgcaccattctctcaacatgcaaacattgtatttaatatcactcccacatgttaaatacaagctttagttagtcatttacgtactcttgctctcattatgtaagtatagtttatggactaaaaaactttcgaatagaaatgggtggatttactggatttggtggcttgatcaatcagaacattcaacagcctcgtaaggtcagtttttcatttccatcaatcaaaggacccggggaagtctataaaaatgagatcatgactaggctagtttgttgttgtaggccgcggccaagtccaagatacatgagaatgttaaatctggttcagtttcagagaaagatactaatattcaggaaccttggtattgggatcctgatgtggacccaaagttgaaggccgagtacaagaaaaaccattcgcatgttagatctatgccattgtatgctatcgatcctagatattatgacttactgaggtgaataggcaagcaagactttggtctggtccaaataacaagcatccatggtatgatgctcctgctacggtgaaggtaataatagtagatcagcaaaaaaaaatctagctaatactagaggaattttgctagaattaagaaatcaaatatatgcttaagtaattaacacttggttatatatatatcttttatgtttgaaggtgaaaacaaaaaagggtctttgcaatttgaacatagaattcacattgggatggcctcctcaattagtctctgagatgcttactaatccaagaaacataaatttcttcagattattcgatagggactttcgccaacgtttggtttgttttttttctttatatagttgtatgatttaaattaagcataattatgatcgataattgaaagtgtaatctttttaatttctacaaggacaacaaatcaacaaaggttttgaagaaggacggaccgcggcagatcacgagagtgaaaaaaactttgagatataagctccttgggcgctctatagctatcccgatacatctaatcatcgatgaaaaccataaaaacctaacggtaagaagcttctccaaacctttcacatgaaccaattgttaaattttgtgttttggaggaagtgaatattttggttgatctattgcttaggcaaaatataagaaagagaaaatgatgtacatgaaagtgtttgagggtagatggaaagtggagccactatacgcagatcaggaacgcttatgcaagtctaggtcgcggattaatgaagaagagtacaaaaaatgtagtgacggaaaaggaaggattggatcaaaggtgacaatggagcagatctttcagccttgttctcttcttaatgtgccaccgatttcttggttcatccgtgagatcaccatcaaaacaataaagaatttgctcgaagatcttagacaatttgttatcgacatgcacaaaaattcagacccggaatgagccggttataatgtagtggactggtattattgcatggattggttataatatatatggttattacgtcactacagggaatccgactatgtggaaaatgaaaaaagaattgtggacaaaacttatttacttgaaggaacaaaacaaaacaataatcatggccaaacagtttgacatgattttataacagaaataataattgatgcccaaagaattgttatcgtagtcttacgatcagctgttggtacatgtcaaagtttaacgaatatgaaaacgttatagtatatcatcggattcttatgagtaaacgcaaacaactagatattttgtggcaagctagatacattcattgtagattaggaagacaacgtccatgtttgaatattaggcattacgatccaactatttattggtcaataaaaaaatagaatatcaaatataccctcttgttttattcaaatactttatgcctacaccagacaaaataaagaaagataagaggaaccaaaccacatataattagaaaatgcaactagttaaagtcaatgtgtattattcatcacacatgaagagacgtgcaacgcgttccgttgactgacttagccctcttttattaacaccaatgtcaaccctattatctctattaactcttgagttgtgtttctgatcacaagaacaatctcatttctaagacaaaaaccaaagaaaaaaatacaaaaaatggggaagccaacgactcaaaacaatagctttattaaccatttcagccacccccaccgccttcaactaaccccggcgacgtcatcaccaccgtgctccgcctgcaaactcaccggaggtaacggccgggtttactcatgtaggccatgcaacttctctctccatgagtcgtgtagcaagatgaagcaggtaataacacatccctctcacccttcgcatacgcttagcctgctcgtggctcctgtctacgatggtggatacttcaactgtgacggttgtggcatccacgggacgggttttagttaccaatgctctgtatgcgacttcgacatccacgcgctttgtgcttacaagccgctctcaatcatccacaagtctcatccgcaacacaatcttaaactcgcgtttcaatctccatatggcgctaataaaggtttctcttgcgacatctgtcgtaagattgggaagaaccagtggctttaccggtgcatcccctgcgaattcgatgctcatgtcggttgtatcactggtcctaatcctcacctccttcaacatagtacttccgcacctaatcctcatactcatcatgccggtcaccctcaacatcaaaactcgcttcctgtgcctaatcaaggcagtaacagggtcaggcccatgcctatgacaaggcccaataggaccattaatcctaataggcctatagctcaaaacgcggctgtcaatggaccaagaagacagaacaacaacttgggttataatgctcaggttgggcctaatggaccaaatgaacttactggtcaaggatcaatggatgggagtggttacaatggtagtgcaagtgcaacgaataaagagtttgatgttgatgtcgatgttgatgttgatgttgatgttgatgtcgatgtcgatgtcgaggttgaatatgaaggtgatgtgtatgttgaagaggctaatgacgagggagaagacgttgatggtaacgacgagggagaagatgttgatggtaacgggcttgaaattgtggcttgtgtcgataatttaagtgttgcttatagtgagagtgattttggaagcagtagtgatgctcgtagccaatgtaatgatttgtctgatgctgatctatatccactgtctctggataacacacaaggaccaagaccggttcgtatgaaccaaggctcgggtggcggaaggaagaaaaacacgaaccagaatggtcaggcttctcggtctaagaaaatagttggtaatggcccacgtggtgggcttcaaggatccaacagtccaatacaaagccctagaggacctcaaactagaagggtacaaaatgttcgtaataatccaacaagaggtcgtggtggggctgtgagtgtaagagttaatagacctcgtgacccatctgcatttattgcacctcaaggatttaatgggccgagtggtggaccctccaatgcaatagatagtggtgccaacaatgataactacaacgaagtcgaaggcactgatgtctatgttggtgaagataatgttggttacgaggagagttatggtggtggtgatggtgattgtgactttgaagttggaggtgacttcggtgatgagggctatgatcagtcttatgatgacaattatggtgaaaatgatttcgaaagctatagcgacatcactggaggaagtgagtctatgtatgaagatggtgaatcttacgggactatgaatgattcacaatatagtggtttcaatgaagagcccaataaccagtatgcacccatggttgggccggttggtggaccaggaatgaataaccagaaccaatacggtcaaaatggtaggccgaggaatgtgggcatgtatggaagaggtggtacaaacatgaacagatatgggaacgtgaaccaaggtgcaaataggatgcaaccgagaactatgggtggtcgacctctccaatataggcccaatggaagacctaacatggcaaatggaggagtacccaatggacctctaggacttggcactccaatgttgatgaatacaatggtgcaaggtttatgccaaagctttgggatgaacatgctcattggtggtggcggtgatgctaatggtggagcgggtgatggtggtggaggaggcttttttggtggtgaaacagaattctaaaagagatgaaaaatggatattacgaaatttaaatgtttttatttcattacgtattgtttttttatgtaagcttgtttttcttatttattttcctcttcttatttcttaaatgtaagagcaatttcagaggccacaatctggctgacctgaccatgctcacataccaaataagaaaagtgcaacatatatacttgtcatggctatatttacaaaataactacatcacctcatcatatctataaccatattcttataccatcacaacatctcatgcttatcatattcatcaaatcatcaatcaacctattctctgaccaaatacatacaaatttcggctaaatatccatggaactcgatgtatcatcatctgtagtttgtcaaaaatgtatacactaataatgattaaattaaataaagcaaacaaactaataaagcaagtaaatgaaagaaatgatataaaagatgaactcaataaaaagcattgaatctaggattaagttaagcgattaatgaaaacaattatcaataagaatgcaacgaaaaagattaaccttctaatttggcatatcaagagattaacaaaggctgaagaataaagtcattcccatgtttttttttttcaatgtacataacttaggatttaaaatcaacaaactctaaataaatcaaatcaaagtctcaataacctcttggtcaaactgttatacaatatttataagaaaatattaatagtttttttaaaaactcaattgatctcaactacaaataataacctttttttttagtgaatgtttgatagctctagaaatacataagcttaaatactttattaaaaagtacatataacaaaaaatatttttagtttcaaaataattcatgatttaactttgtttatggagtttttatattattttatcgatatatatatatattgaataagtctcggttcttctccatcaccttcaaaaagtgagacatagacacgtatcaatctctagtgcttctgatctttcaagtccgaattttgttcatctcccatacatgaagaccattttacagttagtcttaaatccaaattcgaagattcaccaaaaatatgggttctcttttcttaatttcttcgtcaaaaatcccaaactggtaatacacataaggtgttcgatagaatccccaatgcccaaaatttgggtcaaggcgtcaagctttgtcacgtggctctcacgtgattacgttttacattgctgttatattcgttgaagttcccgccttgactctgtttcttcttctcgcaatcacattcctctctgaagcagcgatcaagaaaaagcaagagtcttgagaatcgttactatgaaacgtactacttttctggaagatgctgagagagtaaaactctacaacgatgcaagagctctcttcgctaatggagatcacatcaaagccttggagataatcgaagatataattttagtccataaggaagacgagaaatcgtggattcttcatagcgaacaaggtgagatgttcaatgatctagcgggaaaagcagagaacccttacgttgatttcacatacatgttgggttctgtaggatgttattcgaaagatgtgttgttatcacgaccttgggcacatggactccactatttggctcaagagtctgggtcagtcatgtattacaagaaatgtgtgaatgtagcaaaacagggtttatctgttactttcccagatgcctctgaatcttttgctcaattgcttttggaaaacctaaagaatgatatgaaggaaaacctggagactttaatcaaagatgcagagtccaatatcgctgattccaagactgtagaactaaagggtttactacaacaagactttgagccagaagttttggagtcaaagaaaagaccagagctggttaagaatgagtttaaaggattgaggtcgttttggttaggtttggatgttaacgtcaaaagggatttcatgaaagtaagcattgcaaagcttataggttttgtcaagggagtacatcatagaccgggacgagatgctttgaagcaaattctcgattctgccaaggaagacagaaaatggacattttggatgtgccgaactaaatgttcgaagaagttctctagtgctgaagaatgtaagaatcatcttgaaaaagaacatgctgcagattataaacctttttcggaaatggatatggccaaaaggatagggaaagactggactcgtaagatatcgcttggaagttgggaaccagtggatatagcagctgcagttgaaatgatcaaaaatcggctcccagaggtgaaagcgttttcatataagaatggatggtccaaagaatggcctttagctgaggatgaagagcgcagtaagttactcaaggaaatcaagtttttccttgtgatgttctgtgaccttaaaatcctcccttgtagcattcgagactggatgaagcgttattcggttacgcatcttaaaaatcttaacgtttccgaacaaagtcttgtcgattctcacctagtggatacacctcagagtatttgttttctggaatgtcataaactcagttatatcctaaacctactgaaacgcatcaagtgtgaaagggatgatggtacaaatctagttcgcagagcagtcgacagtatcttggattctactcgatctaaggaaaagattgactttgacccgcagttctcatttctgcttctggacagaagattgctgaaaagcaataatggtccctttgttgatgaaggggagatcaatgttttcgatcccaatgttcactacgccaaggcacatgctcaaggagatgatatcgtatcatggttaactgactacaattcagtagagaagacttttcctagacctatcagggagcataatcttgatatctgggtggctgttctgagagctgttcagttcacatgtaggactttcggaaccaaatatgcaaagaaagtgcagctctttgattatttggcagccattgttgccgccgagaaattgtgtaagagcgaatatgaaaggagaagaaagcttaaagaagatcagtggaacagctatgcatctctcctatgcgataaatgtgaagaatgtttctccagaaaaaatttcctcaagagaaaattatttttgtctgtagtgagagatattctcgaagaagcttcggatttgacatttgatctccccgatattgaaggttgcatgaatcttataagggagcataaaagtctcaacgatgatatagtgctgaagtccttaatatgtctgaactcagtggtcatcttcaaggttcattcatgatattaaattttcatttgcaacataatgacataaaattgccatcttaaagtatctacatgacttacagattttgctaatcgattcaaagattttgctggttgataattcaaggattagtttgctgaacaacctcaccaggctttctttatttgacaaccgcacttacatccttcaactactgaaacctttcttgctggtttgtttgaagattcggttatatacacagagatttccctttcagttttatttggcctttgaattgtttcttatatgttattatgtattttctcatctagaatgaaattgtgaatatggaatccaaagccaagtcagatgcagcagtagcagatcttttactcgaggaggagaagaagaatccaaagccaagtccgatacagtcaaagaagaagaaaaatacaagcaaaaaggtcttggaagttgaaactcttaaagtttttctaatttttggttaatccgttgtaagaatgaatggtctttatggcgcaacagagaaattcaacgagcatgtctagtcctctctctaagcctggtgaacagtaagtacctcaagagtctttttcgcatgttgataattgagttcaggttttctctgagccaaccgtgttcttacatgtctagtaaactctccgtcagccttgaaccggaaactacgtctccaacagtggaggaagattctatggaactaggtgatactgtcaatcaagaggaaggtactagagttgaccctggttctagaagatcttctaaactgataaacagtttgagttatatgtataattcttttttctttcattcgccatcttcaagttatgaaaaacatgcttggagaagattcacagtcggaacatttagaatcagcacttagtgaagcttcagccagatacaattcagctcttgacatgacgctgaaggtaacaacaacaagattcaatacctaaactctcgtcttctgatttatttcattgcctatctctttacttccaaaccctccttgagaagttcacaaaaaatggtgtattgcaggccctcttgaacattaagatactcaaagaagatttgatgcacaatatgcaaccgttacaacaccacctggaagaccaagttccttccgtgctacaaaatttctttactgcttttgtgtcagaggagataaaaactgagggagtctacagttacctcttgagcgacttacttgctctcctagaagaagttctttccatggtttgtgtggagaagatactctactaagcatggtattattattatttttgtcagtacgctttattttgaaggattctattttctactcttttcagtcgagtggtgctgctgaggttcttgtagccatccttgagttttggcattgctggaagaatgctgaaagagaaagcctggtaactcgtctttttacgttggaggaaaaggaaagaatgagttgtagaaaatgcagaaagaaaccaaactatccagagcaaagttcttatggcattgttatggctgcagattctatcagagacttgaaggtatgtttcatttatttccctccgtatgcttcctacagaagctaatacttccccttataagattgttttgtgcttgtatatatgcagtgtgctcttgggaatatagagtttgtggatatccttaaggtgatccggatggattatacaatgctatgtgacattaaaaacggaggctgtggaatagcaaactttattcatcacattataagtaaatgcccacctatcttcacaattggtaagttttgaccaccatgattgtgatcttatgtactcatttcatatattatgcttatatagcaaatttggtgttttgtgggttgcatgattagtgttagagtgggaaaagagtgaaactgaaaaagaaatatctgaaacaacaaaagcttttgagtgggagatagatatcagcagactgtacgcaggcttagaaccaaaaactaactaccggcttgcgtcaatggtaagacatctaaaacagtgtcgcaatatgtttatgctactgttcttctgtaatttttgttacggtctcagaatatgagatgtgatgcaggttggttgtgatgaaaaacaggagcacatttgcatagcttatgaaaagaaccgttgggtcaatctcagacgtgatgctttagcaggagaggtaagtcgaaacagttctcctttgtatttcttgagttgaatagtgaatttagataggccatataatgattgatatatgtgtggtgatgccataggatgttggtaactggaagagtgtggttagattctgtggagaaagaaaggttcggccagagattctgttttacgaagttgtccgatcaatggcctgacaagtgtttcagaatgaaaacccatcatcgatgtatacaatagcgacatgtttcagttcaaaagaagtttttttttaattatatgatttgtctggatgtacaaaactcatctgttgattttggctcttatatgaccaaacgttataagatagttttgattaacatttggctcatctctatcatttactaaactctgtccagttgatttatgtcggttatgaatgctactggttcgtggcttgctactgatcacaagctcacaacaacacatttaaatacgtgcgtaggagaccaagtatgagtcatgagtcacaagtaagaaatctaatgataatgatattgataaaaactgagtctctacaatagaaataacagcccaaaaacagagcaccaacactccaaaacaaaacaaggatgtaaatcaaacataactaaacattattatcttcgcttctcttcttcaattcgtgaaaggagccacgctggtcctcctctaggtaaataagaatgaacccgccgatctcttgtagcgcttgaagctatctcaagactcatttttccacacgtaacttcagaaaggagagaataggcacgtgtcaatcttctctcttgctacttgattcgtcgagtctcttcttctcttgtatcgcctcttactgcaaaaaaattccaaactcgaaattttaatcatccccaaacatgaagaccattctacatttaggtcttacccaaaattcgattattcacacaaatgttgaattctctgttgttgatttattcttgaaaaatcccaaacgggcaatgcacagaaggtgttcgataaaattccccaatgatcaaaattgtttttttccaagcgttgtcacgtggctctcacgtgataagccgttaaatccgttgatattcccgcttttactcatgcttcttcttgtaaaacacatatctctctaaagcagaaagcacaagaaccttgagagtcgtttctatggagtctactactttcctgaaagatgctgtgagcgtaaaactccacgcaaaggcaaaagaactcttcgctaatggagatcacatcaaggccttggagataatcgaagatatgatttgtgtcaataaggaagacaagaacatatggtttctttattcggaacaaggttacatgtttacgaaactatcggaaaaagcagagaaccttgacgttgatttcacattcaagttaggtgctgttggatgttcttcggaacatgagaagttattaagtttgtgtgcacatggattccacactttggctcaccatattgggtcagtgatgtattacaaaaagtgtttgaagaaagcaaaacagtgcttatctgtttctaaccagagtgaagactcggattcttctgttgctcaaatgagtttacataagaacaaaacgaataaagatctggagactttaatcaaaaatgcagagaccgcgattgctctttccaagattggaaaactgaaaggtttactagaagaagacgatgagccagaagttttggagtcaaagagtagttcagagccggttaagaacgagattaaaggcttgaggtcgttttggttaggtttgaatgttaaggtcaaaagggattttatgaaagtaagcattgcaaagcttacaagttttgtccagagagtatatgacagaccgagacaaaatgctttggagcaaattcttgtttctgccagggaagacagaaaatggacattctggatgtgccaaaactgttcagagaagttctctagtgcggaagaatgtaagaaacatcttgaacaagaacatgctgcaggttttaaaccttctaaggaaatggatatgaagaggatagggaaagactgggctcgtaagatatctgttggaggttgggaaccagtggatacaggagctgccgttgaaatgatcaaaaatcggctcgcagatgtgaaagcgttttcatataagaatggatggtccaaagaatggcctttagcttctgatgacgagcgcggtaagttactcaaggaaatcaaaaatctccttgtgatgtttcgtgacctcaaaattctcccttgtagtgttcgagactgtgtgatgcaatatcctttacggtattttggagaacttgaagtttccaaacagagtcttgtcgattctcacctagtggaaacacctcagagtatatgttttctggattgtcatgaactcaataaaatcctaaactttctaaaacgcatcaagtctgaaagggatgatggtattgatgtcgtttccagagcagtggacagtatcttgagttctactcgagttaaagaaaaggttgactttgaccctcagttttcattgctgcttctggatagaagactgcttaaaagcaataatgctccaatcaatgatgaaggaacaatcaatgtttttgatcccaatgtctaccccaaggcaccagctcagggagatgatatcatatcctggttaactgactacaattcagtagagaagacttttcccatacctatcagggtacataatcttgatatctgggtggctgttctgagagctgttcagttcacatgtagaaccctggaaaccaaatatgcaaagaaagtgcaggtattcaattattctgtagctcttactgccgttgaagacttgtgtataagcgaagatgaaaggagaaggaatcttcaggaagatcagtggaacagctatgcatctcttctatctgacagatgcgaagagggagtcctaagaaattccctcactaccaaattatttgtgtgtgcagtacgagatgttctcgaaggcgcatcggatctgacatttgagttccccgattttgaagaatgcatgaatcttatacgtgggcgtaaaagtctcagcgatgatatagtgttaaagtcaatagcctttctgaaaatactggcacataccaaggttcgttcatgattttataatttcattacaacataatgacataaatttcccatcttaaagtatctacatgacttacaggttatgctaatcgattcaaagattttgctgattgataaatcaaggattagtttgctgaatgacctcaccaggctttctgtttttgacaaccgcacttatctccttgaactgctgaaaaatttcttgctggttggtataaaactaaagttaaatacagagtggtttcattttccttttgcattgtttcttatattttactatgtatcttctcatctagaatgaaattattattatggcatccaaagccaagttagatgcagcagcagcagcagaagcagatcttttactcgaggaggagaagaagtcacagtcaaagaagaggaaaaatacaagcaaaaaggtctttgaagttctacatttctcgatttcttttttgaatttgtggttaaccggttgtaaaaacgaatggtcttcatggcacaacagaaaacttcaacgagcatctctagtcctctttctaagactgttgaacagtaagtacctcaagaatcttttgcgcatgttgttaaattgctttcgggttttctctgagccaaatgggttcttacttgtctagtaaatcatctgacatccttgaaccggaaagcacgtctccatcactagggaaggtggaagaagattctatggaaccagatgccactctttcaagtgaaaggggtcgattggaaatctcacccaacacagtcaaccaagaggaaggtactaaagttgattttggttatatacataattcttatttctttcattctccatcttcaagttacgcaaaacattcctgtagaagattcacagtcggaacatttagagtcagctcttagagacgctgcaaccagatacaattcagctcttgacatgacgctgaaggtaaaacagtttaccaactaaaacactatacaatacctaaactctcgtcttctgaatcaaatgattatctttgagaagttcacaaaaacatgtggtattacaggcccttttgaacattcaaattctcaaagaagatttgatgcaaccatttcaagaccacccggaagaacacgttcctcctgcactacgaaatttctttactgctattgtgtcagatgggatcaatgttgagggagtctacagctgcctcttgcgtgacttacttgcttccctagaagaagttatttccatggttcgtgtggagaaaataagcttctaagcatggtattaatataatttctgtgtgtaagcttaattgtcattttaaagtatttctctttttatacccttttcagtcgagtgatgctgctgaggttcttgtaaccatccttgagtcttggcattgctggaagaatgctgaaagggaaagcttggtaactcgcctttttacgttggaggaaaatgaaagaatgagttgtagaaaatgcagaaagaaaccaaattatccagagcaaagttcatatggcattgttatggctgcagattctatcagagacttgaaggtacgttttatttatttccctctttatgcttcctagagaaactaatacttcccctgatatggttgtgttgtgtgcttatatctatgcagtgtgctcttgggaatatagagtttgtggatatccttaaggtgatccggatggattatacaatgctatgcgatgttaaaaccggaggctgtggaataacaaaccttgttcatcacatcttaagtaaatgtccacctgtcttcataatcggtaaattaagaccaccatgtttgtgatgttttgtattcatttcatttattatgcttatgataaagccaatgctggtgttttgtgggtttgcaacattagtgttagaatgggagaagagtgaaactgaaaaagaaatatcagaaacaacaaaggctttatactgggagatagatatcagcaggatgtacgaaggattgaaaccaaacactaagtaccggcttgtgtcaatggtaaatcatctaaaacagtgtcacaaatgtgtttgttattgttcttgtgtgttttttgttacagtcttagagtttgggatgtgatgcaggttggttgtggtgtagaagaagaagaacacatttgcatagcttatgaaaataatcggtggttcaatctcagacatgatgctttaacaagagaggtaagacgaaccagctgattctgtctctccttgatttgagttatgaatttagataggccaaaattggattgatgcatttctggtaatgccataggatgttggtaactggaaaagtgtggttggattctgtgaagagagaaaggttcggccagagattctgttttatgaagctaccggctcgatcgatagcctaaactaaaaagtgacagaattgtgtcaatatggagaaaacgcagcattgatgatgtataaaacagctacatgttccaactcaaaagaagttgtgctctctgtactataatatgatttgtcttggaaactacattgttcatgtacatacaaaataagcaatgagagagccgtgcgcataaattgttcagctactgaaagacacatctttgaaataaccgcttataaccagctcggttcgttctctggttcatacaccagatactgtgaattcattgagtatacagaaagcgtctgtttcactaagagttttcctcagtctctgttttgtggttcaacaaatttgaatcaaatcataattccaaaaataaaattcgataaaattacgacaaatcgaataaagaacgggaaaaatgtcattaaaatccccaacttattgaaaaagttgatttaaatcctcaacttccaacgaaacgaaataaaaatcaaacttttgttgattttctaaataaataccaaactttggttgactttccaaataaataccaaacttttgttcgactagccatattaagtatgacattaacagaccctgttattagagtccattttttgttaacagactcgttaattgaaaacgacaatattccctataacaataaaacaacgtcgttatgtcataaatgctcaattaaatcccaatttcaaatcatatgaagatttagggttagaattttgcttgatttggagatttaagattggatttggggatttaattcggtcgttataacaaaacgaggtcgctttcttgttataggaaacaataacgttttaaattaacagatctgttaacaaaaaattaactccgtgaacgcaatatgttaatctacttaatattatgcctaatatggccatatatacgaaagtttagtatttatttggaaagtcaacaaaagtttgatatttatttcgtttagttggaagttgataatttaaataaactttttcaataagttggagattttaatgacagaggcaaatgaacaatttgaaaacaccaattttttattagaaggagagagtatatatacagaggcaaatgaaaaatttgaaaacaccaacaaagtttttatcttgaaaagcaaatgcgattcacaacgacaatatggcgacctccatctttggaaaatttcaaacccaagtttcgtatatacgcaaatggcgttgcccaagttcgaatctattgctttggtactgtatcatcctctcgtttatataatgcacacaacctgttcgacaaaagtcctggccgagatagggaaagttatataagcttgctttttgggttttctcgtgatggacgaactcaggaagcaaagagactcttcttgaatattcatcgtttggggatggagatggactgttctatcttttcctctgttttaaaggtttctgctactttatgtgatgagctttttggtagacagttgcattgccagtgtataaagtttgggtttttagatgatgtaagtgtgggaacatcgctggttgatacgtatatgaaaggtagtaactttaaggacggaaggaaagtttttgatgaaatgaaagagaggaatgttgttacttggactacattgataagcgggtatgctcggaattcgatgaatgatgaagttttgacattgtttatgagaatgcagaacgaagggactcagccgaactcatttacttttgcagctgctcttggagttttggctgaagaaggagtgggtgggaggggacttcaggtacatacagttgttgtaaagaacggtttagataaaacgattccggtttctaattctctgattaatctgtatctcaagtgtgggaatgttaggaaagctagaattttgtttgataaaacagaagtaaagagtgtggttacttggaatagtatgatttcgggatatgcagcgaacgggcttgatttagaagcgttgggaatgttttactctatgaggcttaattatgtgcggttatctgaatcgagctttgcttccgttatcaagctctgcgctaacctcaaagaactgaggtttacagaacagctccattgcagtgttgtaaaatacgggtttttgtttgatcagaatataaggacggctctaatggtagcgtatagtaaatgtacggcgatgcttgatgctcttaggctgttcaaagagataggatgcgtaggaaatgttgtgtcgtggacagcgatgattagtggtttcttgcagaatgatgggaaagaggaagcagtagatttattttctgaaatgaagaggaaaggtgttagaccaaacgaattcacttattctgtcattctcacagctcttcctgtgatttctccatcagaggtccacgcacaggttgtaaagactaactacgagagatcttcaactgttggaactgctcttttagatgcttatgtgaagttaggcaaagtagaagaggctgcaaaagtttttagcggtattgatgataaagacattgtggcttggtcagcgatgcttgcaggatatgctcagaccggagagacagaggcagctataaagatgtttggtgagctaacaaaaggagggataaaaccgaacgagttcacattctctagcatccttaacgtgtgtgcggctactaatgcgtctatgggacagggaaagcaattccacgggttcgctataaaatcaagactcgatagttctctgtgtgttagtagtgctcttctaaccatgtatgcaaagaaaggcaacatcgagagtgcggaagaagtctttaaaaggcagagagagaaagatctagtatcatggaattcgatgatctctgggtatgcacaacacgggcaagctatgaaggctctcgatgttttcaaggagatgaagaagagaaaggtgaaaatggatggtgtaacattcatcggagtatttgctgcttgtacacatgcggggttagtagaagaaggcgaaaaatatttcgatataatggtgagagactgcaagatagcacctacaaaggagcataatagttgtatggtggatctatacagccgagctgggcaacttgaaaaggctatgaaggtcatagaaaacatgccaaatccggctggttccaccatttggagaacaattctagctgcatgccgtgtgcacaagaaaacagagctagggagattagctgcagagaagatcattgcgatgaagccagaagattcagcggcatatgtattattgtctaacatgtatgcagagtcaggagattggcaagagagagccaaagtaaggaagctgatgaatgagaggaacgtgaagaaagaacctggttatagttggattgaggtcaagaacaagacttactcgttcttggcgggtgatcggtctcatcctctcaaagatcaaatctatatgaagctagaagatttaagtacacggctgaaggatttagggtatgagccagatacaagttatgtgcttcaagatattgatgatgagcataaagaagcagttcttgctcagcatagtgagagattagctattgctttcgggttgatagctacaccaaagggaagccctcttttgatcattaagaaccttagggtttgtggagattgtcatttagtgatcaaattaattgcaaagattgaagaaagagagatcgtagttagagattcaaatcggtttcatcactttagcagtgatggagtttgctcatgtggagacttttggtgacataataaatagaaaacattgttcagaacattttttttttacacaattcgagaaataaagcaaattcaatgttttgggaagaaatcaaacatgggtttgagattttgttttgcttctcagtacatacataaggagatggtgaagagactaataataatatgattgtgaaagatgcttgatgggaatgtcaaatctatcaaccttcttctccaaactcctgtgtgaatctctcgtggacatcaaggtcagacttgctcactgttggcctttgtcttgcaagtaccttctcgaaatctgttctggtgattggtggtggaataatctgttgcaatttattcacatgaaatacacaattcagtctttagaaatcgtcatatgtaaggattgaaaggatttagaaatcagagaagcttgaaatacaaaacctaaatgatatattcaaagtttagatgcgtaccttttcggcaagcccttttgttgctagatcttgcattgtagtctggatggcaccagggtgcctaggcccacatggcatccatgtaccatcaggagacttgaaaaagaacattgcatcttgtgttttacgaacaggttcaaacagaacatcttttacctgcaagagccaaaaagattctcaagacaaaggcttatctatctatagcaacatagggggaaattaaggacaataagaaataactcaggccaagttacgtacacaaacagacacatctgaaccagaaaacccttctgtcttttggcctaaatattcaaaatcaggttcagttaaattatgaggtgtatctcccaagtggacctgcatttacaaaacagatctcattagtaaactggttctgtctcccttgaatgatttttacttgagaaacttgaagcaaatgaataatactttgaacatgtgctgccgagccttggcctctgggagaggaatatagatacgcttgtcaaaacgtcgccggatagcctgaaattaacatggagttaacaaaacaatatttaactggcaaagaaaatagagaaccaagccgtcttatgactttcacctgatcaagagcatagggtgtattggttgctgcaagtacaagtactttctcatcattgtgtccaacaccctaaaagaaaaagagataagtcagagacggaaatttcagctacaactaaaagacatggagtttagttcggataagctatgcacctgcatctgcactagaagctctgttttgatacgtcttgaagcttcactctcgtttccttctccacgtgtaccacacaaagaatctatctcatcaacaaaaataatcgagggagcactttcacgggccatctcgaaaaggtttgatactagcttctcactttcacccatccacttcgagacaaggtctgatgaagacacgctgaaggttgggaagtaaaaaggaaacaacttttcttaagctataacatgtttccaagtataaacactgtaaaaacaaactgacatagaaaaacaaccaacataaagtacatagccatacctaattaaaaacccaagtacctcgtgcaaacaacattgaaattagaaattctggcacccttaaaccaaaggatcagcattcttgcctaattaaatcgatccgccttggttctctaatatgctatttagattctaccaggcctttaaaatcgggttgcagctgcttatgtataacatgtacagatagcagagactcatacatctattctagcatagagcagaatttgcatataaactataaaggaacatcaaacctttccttaatatttctatccgaacttgtagtacaccgttagaattcaaacacaaacaaaaccaaagaccaccctccttaaactaatcccaaactacttcaatacgcttatcatccatagcaactattcaaatccataagtatttgactatggtctcaagctataatgaaagagttaagacactacaccatcctcttcctatatactttcagaaattcaaacacttttaaacatacgttacctaaaaaaggtagagtcagcttcagtggcaacagccttagccaaatacgattttcctgttccaggaggcccatacaacagaaaagctctccaaggccgtctctttcctaagaagtaacaaaacaacagataaagctcacaactttacaaagagaacggtttcaaaacttcaatgaatagctccagattacacaaatttaccagtgaagaactgtggaaacttgacaggcaaaatcacagcttcctgcagagcttgtttagcactttcaagcccagcaacatctgaccacttgatattaggtttctctctaacaatcgcagagtttaacccagctcgaagctttgattgttcaggatcttctccatctttaccaccaccttctccatctttaggcttagttttgggcctcgttgcgacggctgcatcaccgttagatcctggacccgatccaccttcatcgagaacagcacggatctcctcagcacgacggagatactcggtgaatttctgggtaatagcttctctgatcttagggttcttctcatacttgagatgagttttgaagtactcaagcgcgttcatgtatagagggaaagctttattgtaattcccagcattgtcttcatgaaccgcttgcttcacgtactcgatcgcttgttccttgaaattgctgtacataatttagggttttacaagagaaattgaaattctctcgatttgaaattgtgattccgaattgattgaatcggtgatgatcaagggttaaaggagccttgaaattgtgataggaagattccgaattggagacgaagatcggaggaaggagatggagaagagagaagaaggaatggattatgcaaagcgatgaagaaaaaagctagatttgacgacgaagacgaaaaggtcttgaaaacagcggagcgtaggttggtagaagaatgaaacggtgaggcgtttttggaagttgtgaagaattggctcaatgttttgatgaatgataacgaaaacgcttgccgttttttaatatatgcttattttttccaataattttgtattaaatggtttgaaaaagaaaacaaattgtattaaaaagcagaagaaaaacaaaaaaatccacgtagagagatacatcaaaatcccaccattcaaatatattaagtacaaggtccttctaataggaggcaaatttgaaaaaaaattcaaatagtgacaatataaagcatgaccatgataagttttcttgttatcaaccttaagaaaacaaactagaaatattatttcaaaaacaaaccttaacatcaacacaaattagtaaatctactttgaatgcaattgtagcaaaaaatagtgaccaaaattaaacttgcaacaaagaacatttaagttgcagaaaggacattccttttattcattcaaaacatttggagtcacttgtgcacattgcaaacgcaaagaccggagtttcagcagcgaatcgtaattgtcaaccaaagcgaacaggttctattgatacccaactagcaagattattgattatgtctcaatgataaaacgaacgaatgaatttttcactagttgacaatgcattaaagaaaaaaggaaattttcaagttcaaagaatatgttcattagtgtggaagcgattaggcaatacaaaaatggtaatatattattgtcttaaacacaagataatcaatagttattggcaagaaacacatatcttcaagtaagaaatacattatccatcataaacttataataagaggagatcattgcaagatctattgagattttcaaagtactatttgttacctatgcgtctagtcatctccaacgaaacaccaaaacactattttaggtgataattaaccaagtttttctaaaccatagtaaaaaaaaaaaaaaaaaaaaccccacatgataaataccatccgaaccactaaaaaccggtatttgacccaaaaaaaacactaaaccgagagcaatagggcctacgtggcatagtttagggcactcttcagtctaaagacacactaaacacaaagtcaacgcttttctcttcttcctcgactgctctgctctgctctattctctggattgagaatttggactgagaacgacgacaaatggggaaacgagagaaaaaacctaatcgacgtcgccacaaaggtgaatattcgaatgatgctgaagatttctacgatcaacacccgccggctgttgcctccgtcgacgaagaagatgaagaaaactctgacgaagaagaagaagaaaatgatggaaacgaatcatcggatttgccttcaaagtttctcctttaccaacaatccgttcaggtaactgcaattctgtgcttggccttctaagtttcattgagtggttcttactggttttatgaaatcagttaaaagtacttaaattttcttagggagagagttctctgtatctcttgtataaagaagcactaagatttaacaaattgtattgtttgtgtttcactgttcttgttctatcatcaagcactaagctttaacatttgttgttcttgtcttttcattgctttttgtttgttgcagtcaccaaaaggagacataagttacttgcagaagttctttttaatgtatgttggtggaagacaacctttccatttccaagaagatttctgcggcactgctcttttaaggttgttgtgtgtttcactaaatggtacaaaataatgtagcttttggttttcttgcttgaataagtttttacattgattgttggaatagtgcggagtggctgaagactgacactagacggactgctatagggcttgattttgatcttgaggcgttagaatggtgtatggataacaacattagtaaacttggttctgacgtgtattcaagaatgtcgcttttccatgggaatgttttaactcctcttgaggctaagcaagtgaaatctaaatcccatgagctgatacaaaatatcagcttggatgatggtgatgataatgaagatttggctgatccgagtgttgtcgaatctttagagaaagatggacctgattcgttgccaaagagggatattgtgtgtgcttttaattttagttgttgttgtctccacaaacgctcggagttggtttcttacttcaagaatgcacgtgacgctttgtctaagaaaggtggtatcttcgtgatggatttatatggaggtgcttctgctgagggacagttgaagcttcaacggaaattccctaatttcacggtaatagttcattcttgtacttcattcggtaaaaaagggtgtcagagccataaatatcgaacttactagagataaccgtactaacgattgtccatattcatttggcagtatacatgggagcaggctgagtttgatattttaagccgcaagacaaggatcagtctgcactatcaccttcagaagcagaacagaaagattcgccatgctttttcatatagctggagactgtaagtgtcctgtagtctacttccacatccattctttcttcaaagtgggacagtcattacccacaatctcccacaagccttaagaaaatattacagttacaaaaaaacgaagcatatttggtacttaggggtttgcttagcattttagataacttgataagtgtaggcttttggtaattttggttggctgggtgaggtagagattctgtagtgcagccactatggatcaaaacttacacaaacatgtgctcgaatgttactgatatctaaattcatatgttagtgacttatccttgtgttggctggtaagtagcagtgaaatgatattgaatgttatattcgggcaagacaatattcctgctttccttattgtctgtagatttattgtacttgcactcttgaatcattaagttcctgagaagtaactcctggatctgctgttcatatatgtgtaggtggtcattgccggagataaaggattgtatggaggaagctgggtttagctcagtccatttctggctcagagaaatgccggacgcttctgaaatgcgtagaacagatgggtttggtgctggacgtgatatcaagtacgaacaagtcaagagctttcaacagtgtgattcttggaatgcttacattgttgcggtcagcctctagttatgctttctatcttttgatcaaaagacactagccctttaactcagatcctttgtcgattttacatctagtatttatttctgacacgcactggtttagtttcatgatttcaatattatttttttgtcgtctcatgatttcaattatcaagcacaaaattgttaaaatgaatagtgtaggtgcttctggaatcttcaacgctagcccaaaagccaaataacaccattttccacaaattgtccaatttccatcttacggccaacaaaaaaaagagtaaaataacaatttaattttgtatcgattgcgtcgtcgttagttttcccatttcctcataattcttcatctctttcctttctcatctctcgattcctttctttctttccatattccattgatttctctcttcttataaaaatacagattctctcttcttagaaccatcaccgattcgaacagatctaataaatcgtttttttcaccaggtaatgacttgttgttttcgccgatccattagttttttctttctgttctatagttttgatgagatttaagcaacagatctattgatttttgattccatcgatcggttaattttgtagatttttttcgccggagtttgttttgatccattctgttatggcggaagaacacagacttcaagaaccacgattatgtgctaacaattgtggcttcttcggaagcacagctacacaaaatctctgttccaaatgttttcgagatcttcaacatcaagaacaaaactcttccaccgccaaacatgctcttacccaatccttagccgccgttggcgctgctgcgtcttcctccgtgtcgccaccgcctccgcctccagctgattcgaaagaaatcgttgaagcgaaatcagagaaacgagcggcggctgaaccggaggaggcggatggtccgccgcaagatccgaagcggtgtttgacttgtcggcggcgcgtgggaatcacggggtttcggtgtaggtgtggtttcgttttctgcgggacgcataggtacgcggagcaacatgaatgttcgtttgatttcaagcggatggggaaggataagatcgctaaagcgaatccgattgtgaaagctgataagcttgagaagatttgactttgttgtttgttgtttgttgttgttgctttggttttgtgcgtttgaatgaaacacacatgaagaagaaagagcaagaaacaaacatgtcaatgtaaatttaagctttatttgatgatttcttcagtttggttattaaatttgcttattattgatttgattgttccgtttgatgatcttgtagaaggcttaagtcgtattatcaatgtgtagaatttggatttggttgattggttcgtcattacattagccattagccaatatgtagaacagagaaaagcatgacaacaacatagggtagtcttattacaatgcattggagaaaagcacaaactcagaatttcaaaccagaattttgaagtttctcttggatgatcatgtcgattttgttctccatttcaggagtcaaatagttcttccaatcaccgacttctcctttacggaaaaatgttttgttatctctaccttcacataattttccggtcttattgatctccaaactgcttagattacgtagagagcaaagatctataatctcatccaccaatccgttctcttcttcttccttagtaaaggagaatctaagaactcagcaagtctcttgatctgctcatgaggttctgctttcatctcctcaaacctcatgaaaaggacatgatttggatcttccaagcttcttctccagtagcttaagacttggtcccaaaaaggcccaaaaaagttgactcccttacaaaaagactcgaacgtttcctcgaaactggtttttacgttatcatcattagaaaagaaatgccaatattaaaccaatgtgtctttcatgttcctgcaaatatacacaactttacaagtagaatctttaagcacttcttgcagcgtatgagacggcatgtgtgtcgagaacagcctcggagacgatgagaacttggtcaggtccggtttttcgctatagtaattgagattcattttaagttaggggacaagaacgtgcggattgttagaaagaaggggatgatgatgatcatgagaagggtgttttgatctatgcactagtgagaatgtaagtgccttgagccaagtcgtgccgcatttagggaacgaagcaacgatgatattggtgtcttgaggcttgaagtttttctggaaattgaggacagcttggagaaagtggtgagtataccaacatccttggtacttacaaacatttatcccagtggaatctttgtctgaaggtagtgaagagatgagagtctttgtttcttcgcttaagtcatcgtttctcaagttgaccgccatttttttatcatccattaccaaaaattgtggtttaggacagaagcggaatgagataagaggtctcaacgagccttcagcatctgaaacgggagctttggttctaaagcgaacaacactttgtaaatcatcattatgattgtgttgttgcaatacgcaacgttttcaatcaacacttgtttgtttatttgtcaattgttaacgttttcaatcgacacttgtttgtttatttgtcaatcgttatggacttatggttgctaggatttgttgtcgtagttacgatttagttgtagaaaattcgtatttaactttgcgttattgacttatagtatcttttctgcgttaagtaaaagtatatcaaaacatgaataaaataatgagtttataggattgattttcgataactttatgaaagtaatcaaagccgtcttagctcagtggtagagcgcgtggcttttaaccacgtggccgtgggttcgatccccacagacggcgatcatggtaatttgtccaaacaaatttttggtgcttgcagccaccaattacttaaggacgactaccattatacaactatatcataattttgaaaataaggaatatcaggtataattacattgataatactaaaaattaacatccatcaatatgaaaatagaccatgcatgagattataagccaagtttattcagatcacaaacagttcataacaaatacacacataaatatgataggaaaagctgtttcccgtaactaaaatatagaatgcatggaacaacacatattgtccgggcacagccagagttagttagggcagctgcggcagcggtggaaagtcattcaacggcgtctagcggcggtctcacgctggcagttgaagaaaacagccgcgacggggaggccaagatcgttctcatgagcaaactctcgagtgttgaattggtctctgtaagatggcacagacaccacacttcctctacgggtctgcttgaacaacaaatacacaaagcggtggatccctatgtttggccgaggcatctcgtacccgattatctctttacctgttttgtattctcatattaaaatctttgaacagaaaatatacgtatatgaaatgtgatttgttatatctaaggatatatgtataggacttaccaaatgatacatcagtcgtccccgggatatcggtaacaatcctgagattagtcattgcaagaaaatgttatgtatttttattatatgtctcttaacattttttatttgcttctttggtaaatctctaacttaacaaaatttgaatggaacaaaatttaccagtgcaagtgctctctcagataaggatcactaggtccaggaacatcaggatcagtcataacctgtttgaaatattcgatatatgtgaatacacgtgacacatccaatatacacagataaacattatataacacgtatgtatatctgacacaaactagttcgttctgcaaattaatattatatatatataactgcatagtagataatataaataattaaaatcttatttttgtgtgttttacagaaatattcaaataagtctaacagttagagaggaaaaaagtttctatttatggcataaagacgggaagaaaaagacatttaacgaaaaataaaaatcacctagctaagttatttatgcatttactatatatatgatttatatgacgatataggtcaataaagcaatgcgtaccaaagtgaagaatgatctcatgtcacccccatgaacttcaaccttaggtttgtatgtaactacagaagggaaaagttcatggccattgtagacttgcttgtcagaattataggtcaccgtcattttcactgcctgcaaacaattgtccacaacgtctccgatcactctcccaaccataagcgggtctgaggaaatcctggccatctcgattgcttggttaagaatttagacgaagaaatgaagaataagtgaaagaaattaaggaaatagtgttttgagtttgatatgaaaatgtgtgtgttggaatggggagagacaagcttgggcttgctttagttctgctttgggggatatgtttgtgttgatttgatgaagcataaagtgagaagaacatgtatatttatagggtttaagagaagaaatggctgtaatgcatttgatttgacgtttagatccaaggaatttatttattttcttgtcaataagatgcttcagagagaataaaaaaaaagacgtttctttaatctaggatcataccttacacaaaaaaatgagagtagttttttttggagagttgggtatttctgaacactaatcaactatctgttgtattggccaaaataaattatttttgtatacatacgacatgattcgataaaaaaatatgtctttgaaccctagtaagaatttagaagttagcttttttgttaggacacaataaaagattgctttataaaataaaacataataatgggcgtgatggtaattcagtaaaattatcgtcactgaagtcgtcatttcaaatctgatactattattttttttatagttgttttataggaaaactctttcctttatgaaaataaaaatttaattagtcaggtggatagattaaaaactttattttatacataaatttatgttagaatgaaagaacctggaagtgttattacggatttacggccatgttcttctctagccattatttaaacagaatgaacgcattataaatggtggcgtcgggaatttagctttttctttttcttttttcagcagaatttctacttctagtacgttaggagaagtagagaactaatattttatatttatttaagaaagcatcgccattcgtcgtaggactaggactctaggagtatctttgctagagaaaaaagataggtgtcttgttttcttatgtcaataggtggccaaagggaagacaacctcgttttatcgatagttgttttctagtaccagcttaggaataatgcaaactaagatatttcttgcttaaaccaaatcattcccgaaaaaatatcagtttttgtaaaacatcagttttcagctctacaatataggtctcttcgtctagaattcgatatgaatttttgtaggtatccttctttagcactaacaagggaatttgtgcgttaaaattataataaaccaatttcgaacctatgagtggatgagaagtggcagattttccaatatggtccttaaaagttaaaaattcctcaattcctttttggacagtatatatatagaacatataaatatatgcatacaatttattcaattaacttagtcaccagagaaatgttggaaaaaagagataacctttttttattccatgtgttagtgtcgaccatgaatcacagctttggttgcttttatcgcccccttgttttttaatgttaaagaaagaaagatacaaatttcaagtgtcattattctgtttaaaattctaaacgtcgcttttgcaataagggtaatatgaaacttaattattttcttaaaaagtaataatattggagtatgaggaaaagaaatatattctctgttaggtgtgtggatgtattgcaaagaatatatcccaaaacaactaatattattcttggacttaccatttttggaaatgttaatgttggcgacccacaaccccaatgcgtttccaacacattcaaaagctgacagtttgacaaattgtgaaaggtcacatcaacttgacaaagagattcatttcctctgccacttttgaattatttatatgtaatttctttccttttccataaaaaaaaactatgaggtagaaaaacaagatctgggtttcctcttatagaaaccctgattccaacctaactgtcttcagattacacgtttcaagtgtactttgcatgtgatcgtgataatatttttaattattatttttttatactttagcatatgctcccacaacaatctgtgacactaacattaatattaaaagcacaacatgtcaatcatatatacggtcttattcgcaagtcctgtgatagaacttttcttctcaggtagaggaaaccaacctttcatttgttccttgaaactgaaaagtaaaaaaacaatcgaaattaaagctcgtcagttacatcgtttaattagagccgttattcgtgacttatatattaagacagctatagtttattgcaaactttgttgaacttagaaatttcagtgtataccagaaaaatgttttgaaactaaatgcatttacacatacatatagacataacgcatttaggcatttctgacatgttttcgcaccgacttgattggtctagagaccgtccataaaaaacagagattatcatttagtttttccacgtacaaaagtataattaaatgcaattttggaaatagttaattcatggaattcaatggactttgaatacagccaattgacgataagattatgtttacttaaatgttgatttactcggttgaaaattagtgaaagtttctatagtagatcacattttcttcttttgttttagggttatattaatatctatgcatagaagatgaagaaattaagaatctatgcataaatattagttatttaggtaagtatgaagaagaaataatatataaaccaaaaatatcttttaaaaaaaaaataattacaaaaatgccattaaataaaaataattgtaatatattgatgataagtatataactatttgtttaacgtgctaaaaactatgatatcgcgataagtttacaaattctttgttaaaaaatatttatcgatttaaaattataaatctgtattttttatttatgtatattcagcacaagaaaaagggattagactctttttgttatattattacgttagatactttgctaaatgaaacattagtacattacaattatttttaccgtacttttatgtcatgatgaatgaaagattaaaatatattgacaagtttatatgatatattgtataatttcgtatgttaaaaataaatttaacacattactaattgtatattttcttaacagatatcatatgttttaacataattttttttttacttacatgcatataaatattattatcacgttagtctaatagataatcatctaatcataatatattattcgtgaagaaattgatgataaaaatattgataactattttattacattgctaaacaatttgatatatgcaataaggacatttttgtctaacttacataaattatagagagagaactaattatatagaaaacattagtatattcttaatttttgattcttctgggtatagatagtgatattatcctttgttttaatgattttctttcataaaatattgattttataacttagtttttatttatgagatacacaaagaaatataatcttttgtcgtaaaaattggatcatatatagtatatcttcacgcattacatatgtatgatcaaacttaatatgaaattcttctaacgggtttcataaattgagaacaatagaattatttttcactacatggttcttttggtttaaatacatgtttcttcttcgaagatgtactatttctcgctttgatctcattcttaaccatcaacatatttgttctctttttattttcttttttatctataatgaaaatatgtactaactcataatgaggtataactcatttcttaatttttacatatgttaggaaaaaaggaaaataccaattactaatttacttcaagcctttgaaatctgaaataaataaaatatcaaagaaatatgtcttatcatttgaggaattgttttttatatcaatgattgctaacaggcaatatcttcaacgatcttgggttgcaaccctccgacgtatgctatgccccaatcaaatcagattttaagaccactttgttatgtaacttttcaaagtctcttgggtctactctcataaggtacccgtctgttaaatcttagtaacggcctcatcaagtccttacaattctttggtccaaactgagcccacatctatttttcgaacatggcccacgtgaaacaacgtcacctttaacgacgacgtacgtcttgctaaatggattgtcaccattcaatagcatcttccttcaagtggtatgtattagggacaatgtcccacatcggaagttgagtaggatcttaagtgatatatataagatatgggcctctccacctattgccaattggttttaggttggaagcccacagtctaatatggtatcagagcccgattcgcacatactcaacccgatccacatcggtccggcccaatacttggcccgccaatccatgcccaaacatatcgagatcaatggctagaagagccatcatctcgagggggcgtattagggacaatgtcccacatcggaagttgagtacgatcttaagtgatatatataagatataggcctctccacctattgccaattggttttaggttggaagcccacagtctaatagtatgcgatctgtatccggtgatcctcaggcgactcttggagtcttggtaagagaaaaattgtaggactttacttaaccaagccgctggatctccgctggagaaccgaggaaactccaacttagccaacttggattgaaacattagagcatcattattggttgtttcttagattagttcttaggttttttcttgttattgattactaagaacatctcatttcaactcttatataagagacattttgtcattttgtctcttatataagagttaaaatgagatgttcttatcataagaactaatctaggagacaactaataatgatgctcttagttgtttaaccaagtggtagcttgtggtctagtgactattagataaaatgacagcttgaactgcgactgggattgtgattgtcgaatagaaatttcttctttgagcacaaatagacaaaatgttgggttgcagtttcagcaaagccctctggagttcggttcagtccaggcttaggttgcactcacttatttttctgaaattgggctgaacttctttcatggattcgtcgttctagcacttctgctccctccacactgaggaagcttgttgttcattccgtcgtctacgtaacttggaagcagagaaataacatgctacataactcgcatcagatggatcatgcttcagtcttcaagatcatcgataggaaaatcattaactccatcaacgcaagaagacacaaaaagaagttccgtaatcttatgagtttttggctcatatagtgtttctttctgaagtttgtttacttccttgttttttatcataatttttgccaaggaactaattatttaggagttctcagtgtaattcctaactctttcattttatatgatatttaccgatttagcaaaaaatagacaaaatgtttgtatggctgaaatgaggcacaatcttggttgatttattcattgtctatttcccaatgaactgtatagtcccaaaagtaacttaaccaaggtttaatttatatcacctttagttagttttccattttcaatctacttgtttagcaagctaacctattcacaaataaaaaaagaagcgtgatttttgttagtagaacatcaaaacccaacgagaaacgctttactgatatcaacttatagatgcattgtcaactgatcaaagatccctcgatctgaatgatgaaaaagagcgatcatatgagaaaaaaagtcaaggatacttgttgtgagacttataaagaaaatatttcgtagttagagtttataaaacaggagcatttgcttgttgataaaagcaacgacaaatttttactgccaatttaattacaatttcattttcattatctaacgttaatatgttttaatgtacatagttaaatattatgttatacacttatactaataaaataaatacatgaatcaaactctcttttatctctcctcgagattttgcgattgaggaagtccaataggcacggaaattttctcattatcttctcgtcttccatcatcaaaattcagagagtagctcaaataatcatatcggaacatgcttttgtcatatgtcgaacgttgtcttcttacatttttcagctttccacacaaatttcccattatatttttcttggagatcttgcttagcctttcaacaaatgttgcagttcgttagaacaatggattttttcttgacgtaatgtgctgaaattacgttagagcctacacgatagaaaaaaatgttagaattgttaaatgatgtgtttgagatctcggcttttatgaccaattaactctaagaatgatacaactacttgtagtttggagagaagcatcaacgagcaaaccttaaatattctgagaagttaaacaatggtcggtttattttttatctatattgtgataactttaaataatgggagataacgatctagttatggattttgcatgagctcattaataaaaattgcatgcattggatcatgacacaattacacagtgtaatgataactaattatgatcttatatgtaatgagtttgtaaaacaaaatagtaatttataagaccaaaaataaagttacaagtttaatccaaaaaacttctgtacacaaacaaaagtaaaacaaagttaaatcttaaataatttatattattagaaaaatatctaattaatatcaaatttaccacacacaaaaaaaactatgtaagattatttcttaataaatttgtaatataacaaaaataacaaaaacaattttgaaaatgagaaagtatttataataaaactaagaagtttggaataatgacaacaaagcttgagcgtaaatggaaatcttatgtaaatataacattcaagagtgatatactatgtgataagaatttataagattttgacatgtattaactaatttattatattttgacatatgtctacataataaaatttgaaaagatagaaaaaactattcaatgtaaataaatgtaagatatctttgaaaagaaaagataaactaaattttatagtagtactttgggcctttggggaatttaaatggaaagcaagatctacggtgtgatactttttattgtaaatattatagatatggcaaatgataaagttagaatcgagattttggaatcaaggcttggagatttaaagagctagccgcagttgggttattacttacatagtgaaatggtttcctaaacgaagatggctacaaatctttacatatctcaataataaatatagaatatcttcacattgattggtgcatcttcttgatcattctattatttctatatcacattcgtctgtctccacatcatcacttctcgtttcgtcttattgttgttatctttcgtgaatagagaagaaactcaagaatcaagatgaggtacttgaaaaattcttcctttactcttctaccaattttcatatagatctctctattgatatagtcttattgctcaatgtatctaacaattgagaaatgggtttgttcgttttatagtaagcttaatagtgatactcttagagaagccattgcaaatatcactcgcccatcggaggagaggaaactcaaaatgaggtacttgaaaggtctttcattaagatatctcttattgctattgttctagtttttgattcctatgctaagattgtcgtacatagatgtatcatatattgtccaatggattattgctagatctaatttacttagtgaaatgggtttgttggttatatagacaacttgagagtgagtctcttagagaagccattgcaactattgagggaaaatctgaggagaagaaacgtaacgttgggaagacagtgaagcttcaaagtgaggctcttagagaagccattgcaagtatcaatgaaaaatctaaagagaagaagccagaataatttgtgtgtccattacgttggaatgattcttaaatgttgtttctttggtttatacgtacgggagcttgaaactaatgggtctttttcatctctttaattagtcctatattattgaataactttatcatatacttctctgcaatcacagttttcaaagcgcttatgtggtgatttttctatccaactagggtattgtctttcgaaagttatatagaattgatcaaatcaaatctcatctatgtaaatacgtcaagtcaagagtttcaatatgagctaagttcatgtctttgttggattaaaactaatgcgaaatggcctataatttggattttaacaaacacaactgtgtttactttgcttaagattagtccaatccgaacacacactaattcccaaaaaaaaaaaaaaaaaaaaaaaaaaaaaaaaaactcttaacatacttaaataaaccttttcaaaataccacaatgtagaagatgggcttttttagtaatgatcacaagcggcccactaatataacaaaagcccatgaaacgaaatcaattcccctagggttttagtctcttccttccatttttcttcttccttgatataaaatcttcagccgcctctgaaacataactagggcttccgctttcttcaccattcaggtttgtctctctccacaaacatcgtcacttctcatttcgtcttcttcgttcatcgtaattccatgaagtttttcgatttctcctgcttaatctgaattctatgtcacaatcgaaaatgaggtttttttttttctttttctaatcgatctcttattgttttcaggatcagagattcgtgacctgagaagacactcaatatgaggtactgtgaaaaaaatcattcctttacgcttctttcaatctccatattgatctatgttcacttgctttagaattagtgttgcctttagattgatagcttggagagtaattgctcaacagaatcatatcatttcaaatgaatggtaaagtagattgctttacctgatttggtgaaatgggtttgtttttgttatatagtaagcttcagagtgaggctgttagagaagccataacgactatcaagggaaaatctgaggagaagaagcgtaactttgttgagacagtggagcttcagattggtctgaagaactatgacccacaaaaggataagcgtttcagtggatctgtgaagctcccacatattcctcgcccaaaaatgaagatctgtatgcttggagatgctcagcatgttgaggaggtgattgaaatctctatactttttgtgtatcttgtttggtttgaattggtgattgacacaaagtgtttgatgtttgttttgataggcagagaaaatgggacttagtaacatggatgttgaggctttgaaaaagcttaacaagaacaagaagcttgttaagaagcttgctaagtcttaccatgctttcttggcttctgagtctgtcattaagcagattcctcgtcttcttggtcctggtcttaacaaggcaggcgagtttcttcaataactttgatacttggtatattatatggtcatcatttagtttcgttttcaagctctatgtctgaggtttctacttgtttgattgatgaacaggaaagttcccaacacttgtgagtcaccaagagtcattggaagcaaaggtgaatgagaccaaagcaacagtgaagttccagttgaagaaagttctgtgtatgggtgttgctgttggtaacctttccatggaagagaagcagctcttccagaatgtgcagatgagtgttaacttcctcgtctcgctcttgaagaagaattggcaaaacgtatgattctgttttgttcctatgattgtgtctaatttctttctaaatctctctctagtgtactaattttgatttggatcttgatgcaggtaaggtgtttgtacttgaagagcaccatgggaccaccacaaagaatcttttgagctctctcttcttatccttcttccatctcagaattttgcattctgtttttgtttcagagatctgtgcttgttgggatatggtttggatttatattagcagttgttttttgttgacaatatattatgcaatattcgttttaattatcatattttttctttatctcctaaaatatgattttgatttcatcagtttgaaattttgtctttcaaaccttaaaattttctgacaatctcttcttttacaaattctattgactcaagaaaaatacaaaaattgaagctttcataatgttaaaggcttaagataacgttttatgcatccttaaaagctacaagcattacattggtggatataaaccaactaaactcggaacataactaaagaaaaacggcagacgccaaagattagatcggtctttctcataacttaactttttgaatccattctttccaacaatgtatatcatgttctccttccatctgtcatcacaatccacaacaatcactttcttgtcttcttcaatgaagattctcagaatactcataacaggaagatcacgcagagaatcaaattccaatgtaaaggatttgctccacgacaacacagtttcagtatcaatcttattacacatccatatcccaacctgtcccatatcaaacctcgaacgtaacaacagaagttgctcttctctaacaactgatagagctaaagtaacgaaaccatcctgatacagaaacggaagaggcacacttctaaatgtctctgttgtgaaatcaaaactcaatatattgaatttcgtatacgaaagccagtaggtatttcccttgaaagacacgcctccataatagtgtttttccacgttgggatggactttagaaagaaccctccatgaattagactttagctcaaagatttcaacgagtttgcaaccatacgtaatcctcaagattttgtagctgtcgtacgatttcttggtgctgttgtttccgtaacctagagcgatatcatgattataattgtaatcagttcttggttcgatccacctggtctgaccagtacacggattcacaaccacgagtttagtcttgttaccctcttccgtggaacataacaataagccgttgcaatgaaaaacttgcgctatttcaatgttgttgggaatttctttgagattggtactcatcgagtaaaccccaaaattactcaacatgagaaccaaatcttgctttgctgctttatgaaattgctttgtgatgaattccggatctttgaataaagcattccatcgtttgcatgtaaatcgtagtcgacctagagatgttgcgggaagtcgagagagtatttcatctaccaaatcccatggaagatccaatctcaccattgtttttacttgatctaaaagaaatcagatattagggttataaaagctttcacgttttcactttcttatataaggacaaagaggttaattaaaaagaaagattaattaacattaagttttatttatgttttcccatttaaaagtatttccttttcctattaggttttctagtttttatttagtccctaataataatttgtgtccaaaattatcgacttaactgaaatatcaaccgaatagtaaataatggaatagtcaaataatcaattagctgaaagaattaaacttgataaaaaaattagcagggtcatcatacaaagctaactttcaagattaataactttttactattttttttgttatatttttaacactcgtaatatagcaaacttacttgtcaaaaaacatgcaaaagtaaatatttgatggatactttgaatgaaaaacatagcgggtcagtttttaaaatgtgtaaacatgaaaaattgtataacacattcatcactggttttagatgaataatcaggtagcaaaacgttttcatttcgtggttaagatgatttatgagacctccgaattc

SEQ ID NO: 295 - DNA, 94884 bp, Arabidopsis thaliana
aagcttgtggttgatgattgggagattgggattaatctttgtgaagataagagtgattttggtagagatgaagttgggaggaatattaaccgtttgatgtgtggtgtttcgaaagagaagatcggacgggttaaaatgagtttggaaggtgcggtgagaaacagtggatcttcttcggagatgaatttaggtttgtttattgatggacttttgtctaaggttggtttatctaatgggaaagcttaaattctatgaaaactaaaaaaaaaaaatgtwtgaatttttgtcaaattttttatttggggaaactactgtctcttaaatttaaatttacttttttctttaagtccaaagaaaaaaactctttcacaaaaacgtaattcaaattaccgtttactttgttttttttaaagttacatttatagaatggccgaataactttttatatcataaaataactatatactcattcatgcatattattttgattgacaattttttttttgcatagtcacactaaaaaacgggtattccaccattatgtgtgttaccaatcaatactgctttattagatctaaactttataccaaatcatcaatattttccaaacaaggctcaaacccgaccggattcaaagtttatttcactaattcaacttgtttggttttggttaaatttggaatcaaaatgtcaaactgaaatgaaccaaaaccaaaatttagttcaattccatcatttttgtttttttgttttcttattgcacttctgctctcagtttccaagtttgatttgattcactattttgtcactcttctataacatcaaaaaaagaagaaaaaaccattagtgattatgacattttttgggaaggtcccagtcccaattacactttttaaagattatttacatactttttgtgtactacatatcattcaacattcatacaatcaaatcatacacgttcacatatcatccaatttatagtgtagaaatataacaacacaaacattcataagccataatactaaaaatgaagtgtttattttattttatcttaaaatatttttttttcaacccaaatgagtctaaaaaagtaccaaagatgcatataaatattcaaaaaggtgttatctacccaaatttctagaaaaaaaagaaagaattgaactgttttcattttcacctaccaaaattacataagaggctaaagttatattatctaaaaacaatcactcatctacctagagctgttatttttcttatgactaagcagtaaacgaccagacacattcttgtttaggccaaaacgtagtaaaacataaacaagaagacggtagccaaaagccatcgctagcaacacaagcatgttcctccatttggcatttgtgtctggagatatttggtaatttccttggattgcttggtaacccgatatactcctcacttctccgaccgcaaacacttccccgaggtactcgttctccaaaagaccctacaacattcaaagcatacaagaatgttcttgagttttccctgggagaaaacagagattgtttgttttgagagttgattatgtaacctcaatggagtaggtgtggaacgagatgtaagcaaacgggtaagtccagacaggtttgggcaaggcggtacggattctgaagtgtcctgctgcgagcatcatgatcacctgcaatgatgcatatgaagaatgaaaatcctaaggcatgaataatcttaaggcaggcactaatcactctcatttctaatctaagtgattagtaagcaatagttgcaagttctataagctaataataatataatcactcctaacttcagctctcattgacttgagttaagaaccattctagttctggttggtgaatttcattgaacgctgttgagcataaatttccctaagtcgtaaatccagtactatctagcagtcagtgtaccaaatcaacattcaatccatgcaaaatcctagataggaaaagaagaacagtagaagaacatgaatcttaaattagataaatagtgcgaaagaaaaaactcacatgtacagagatgagagtcaaagtgctccagtaaacatctcgccaaatgcaagcaatgaagagcatcaatccttcgttcaccaataggcacatgaagaagttgagcacaaagtacatcaacaagctgaaatcatctcttaatccaaccatgaagtagaacacaagacttgaggaaatggacatgagaaacaagaacggtatgcttcccagaaactgccctagtaagaagacaaaagcgcccgaatgctggttcgatgcttcacttctataaatctattaaaagaaaaagtaaacttcagagctcaaaagaagaagtgatcaaagataagagaaatcaaaaaggagaaatagtcaccttgatttcttttaaaagtgaaggtattccagcaatccccaacagtgaagcaaacgagacaaaaacaaataccgcagcaactcttgtctgtaagaaatatttacaccgaacgataattgcatctcttggtactcaaatgtgacatgctgagaatggtttagaagacttactgcaacagaagacaaagagtgacctaagccagaatataatgtgccaatactaagtgtaagaatcatgtagaggataagtcggagccaatagtatttccattctcttgacataactaaaagtgatcgccatgtgagcactgcaacacgtgtagcagcaccggcctttcccttggatttaagctgtgtgccctcctgcaaatgatataggaaacaaaaagaaaattgatttactaacacatgtctatttacagttatgaagctatgatccaaaaattatcattagaaaattattaccctttcggtaagttttattatcatagcttcgacagaatcagcatctgcagatgatttataagtcgcctcgagagtgcgaatagcaacagcagtatccatgttcactgctgaaaagtccccattatcgtcctgtcgtttatatttagctcatatcagaaaactggcgttacaagaagctagaaagaaacaaaatcatataactcaaggtgtataatggtgtatgcacctgccagtttttgcacattgcaataatcctatcgaaatctgtgtttatagcccgcaaaaaatgatctgatggactttgcattatcgggcacgggaatccagcatttgaaaaatgcttcaaggagacagacacataacaagcaaacataatttagagagtgatcatttggccatgatatgagaaatttttcaagttcaaacaatttatacctgtaagcaagccagtgtctccccaaagaagagtgtgtttccatttgatagaaggcagattctatcaaacaaaccaaacacttcggtactactttgataaatggtgaatacaagagtacatcccatacttgcaagcttttttagtgtcaccatcataagcagtgccgaaacactataaaaagagcaaaggagccaattttagaatgcaagattttaccttttagtagaaggcaaataataacataagtctagaaatggttagaacctgtcaagatgataaagaggctcatcgatgaataagatatgtggtcgcatcacaagttcacgagcaatagagacacgtcttctttcaccacttcgaagacccttcatgtaacaatgaccaccgatcaatttgtttgcataatcactcagagacatggcctgtatcgcatcttcaacaacactccttttctgaaagaggaaacccggaagctgaagcaacgctgaatagtacaagaattcacgaactgtaagtgaaccaatcaattgtgtttccctctcaacaaatccctgcaatgcagcaaaccaagaatcagaaacacattacaaaccaaaaagaaaagatcaagaaaacaatatacaatagtgactcacataggatccataaggcatatgtgactttgagccattcacaaacacctcaccgtacatttttgctgaaggaggcaatcttcctataaaagatgtgattagatcaaatgaaaaaacaaactaacaatgaataaactgacaaatgacataccagcaagagccctcaatagagtagacttcccggattttgcaggacccataattacagtcatagtcccgggaaacgcataaccattcgaactctttacaaccttatcagaatattttctctttcccttcatagtaacagtcaaatctttccaagcaatagaagcaccagcaatctttctaacaacaccagtcccagctcctccttcaggaacaggaggagaagccattgatccgctattcatcttcgacaacgaaggagaaacaggcgttgttgtagcgtcattaatagaatcaccaccaccagcttcatcttccattcttaaatcaacatcaggtgtgtcttcccattcaggagagtcttcaaaagatataggttgtcgaagagaaccaggttttcttacatagaaaaagtgactagatggaactctactagtaggactacttgcagaagacgaagacgaacggtataaatccgattgagactgtatctcctccatcctttgacacctcaagaacacaaaatgttccaaagaaactacaaattttacaataaaatgtttagattccataatcaatgcaaccaaaacaaaaaggccaataagtgaagagactactatatatagtaggaatcagtgaagcactattaaaaatctaaactttttccaaaagctcactaaattacagtttagtgactagtgagaagtgattcctaattaagtaacttagtataaatcataaaaaccctaacttttttcagtttctgcattattgagacactgaaacagagtaacttcaagttcatagattttctcagcaactaaacgaagactaagcaggagaagagactcagttcgagttatgatgagaacaagatagagaaggagacaaacctggatctgagtgaagtaagatccacagagaaagacgcacagagactggagaatctcttcttggtagcaagagtgagagagctctcaagtgacgacgtctctctaaccaaaccctttgggttccgcaaataaagaaacaaaaaaatggattgggaattgttttttgttttgtctgaaaccaaatgctttaacgaattacataaaagtgagcaaaattccattttttttaccttttaagaaaaaaaaatcatattattgtataaaaatataaacttaatttgcataaaaagaattatttatagaaagtattgtgaaaataggatttcttaaaatttgaaggcactatggcatttttgcagatattatatttttcctttggatttttttctttttagttaagtttttcctttggatatataaagttattttggggcttagttgaagtaaaaaagtttttatttctattagaaattttaaacaatgcctattttcacaatactcttgtgaaaaaatgtcaatatagaaaataatttaaagaaaaaaaatactaacttcaactttaagcttttttgttcgtttaagctttagatatctgaacaaaggtttggcctagtgcttttcttaattatgcaaacaaattgctgacattttaaacgatataatacaaaattttgaaatatcttgctcttttttggtattagtatcagcttttcttctttttatttaatgatattaattgaaaagaaaagaaaaagaaagtgatatttggttatctttataatcaagcatgaagaaaccagctacttaaaataagaaaaaaatattgtttgtatgataaatggcttacagattttttttcattttttctcgatgttaacgttatttgagtaactatttactatctgaatgggaaacactatttggttttgttgaaattggtggcaagttttaagtgggcttgaagaagtaaaacggcccatacacaaatttgcaattatttccctctttccgatcattttccttgaaatcgttcacgtgatccatgatactcctcctccattgccactctatttagcaatttactcttctgctctcttttttttttctttctttcaagtttcaccatgcaaagacagaaaatataagaaaatgcttcatttggtattcttggttttcctataaaatgaatatatcgacctatccaaggctagtagcttgatttttgtagtgggtaacttcaaaaggaagagtctctcaagaccaggagtttggttctcggcggtgggaaaatgattcatttagcctgtttttgtttgtagttcaaaaatctacgtaccaaaaccccgaaaattttggtcaaccaaaaataaaatccgaactatataactgcgttatcatctattcggcactacataggaacttgaggtaacaaacttaacattttcttgtttttctactacaagaaaactgtccaattttcgaccatgaatttagtcagaaattggtcaaaaacaaccctgaataaaagcaataaagaagagttatccaaaactaaaaatttgaataaaaaagcatagaaaataacacatacttttgcattacatacgtcttcataaatatagacaccaaaagaatcaacacatcagtcttatttgtataattaaattctcaaaatagaagagaaaataatcaaggcgatatcttggaccgggaggtaactttagatgaggaacacttaatggaaacaagaggctgataatttacaaaccggctcggagcggatcttggtcggaaccctttaggcatacaactctttacttgtgtcccatgaaaaatctgattcctcggattcaatttgaccgtgtcttcgactgataaaggcatcatcgacgagcttggaacactctccagtggtattagtctccctccagcgtacaagaataaaaggtttagagtgataatgacaatatgaactcttgtgttgaacattgggttttagtttgaagtaattatttttgtttttttgagagagtttggaatgataatgtgagggatatataagtgggaggagatatacactggtttagggttaaagttcataaatgggctcgtgagtgatggctggaaacataagagagaagagtaagtaggagaggacagaggcaaaatggctggaaaatggtattaatcaaaatacgattttatatgtgtgatagagatacaaaaaagtgttgatggggtcgggaagatcagaaagaggtaggaaagtccgtgagtttcagaaattacaatcaaagatcaaacatttgtctttgcatttatgaattatgacacactcacacgcaattttctatattttcaaactattgtttctcttgttttaaaatggtttggagattggacatggatttttaaatatatatattattatgtacacggttgcatgggttttcgggactattggattttgctttcttttggataacaaaaacacgataaatatttcattaaaccatacaaatcttcgattgataaatacatatacgaaaacatacctaaggaaaaggaatccattgttgtaggatttaggtaccatgcggttttccaaaccatagagtaatctcatatgtattgaaatttaaaaaaaaaaaaatacaaagaagaactaaaaaacagaaaaaaaaaactaagaaaatagggaaattaagttggagtctctttaatttgttttttttttgtcatctagagttattttaatgttaccatgatgaaatacttgataaaatacaacattaaaccgaaagaaaacgagattttttcgaagtttaagccctaagtaaaaaagtcataaataatactacaaagcaagaggaaaaaagcaatagtagttgaaatcccaccaaaactataagtcgcatagttcttgaagattatttgaaagaaaagtatcgcggatgcccaccaccaaccaacgatacacaagtcctcctattgagatgaacaacaaccttcagatttcagaatttttaagctttataacctgataaccactgcccaaactttctttcgtatgtggtgatgtcataaatcgacaagaaacaataaacattaagattatgtgccttcattggatcatggactgaaaattaagctcttcgatcaactaaaacaaatttatcatcattgttttcatactcgctgctaagtttgcaggggagtattagagtccacaactaaaacaagtccaaacccaatgtgaggtctacataagtagaattttaacaagttagaagattcatataaacaattatgtaatgagaactatgattgtaactttgagagaactctcttccttcatcttatgaaatatcaaatctagaaacattggcttttggtgacaaaccttaagctcctttacatttttctcttctttacatttcaataaagctcactagaactattgcatttctatctttatataataagctcaatgaacatcaatctatatttgtcttaaaaatgtcaaataaatagaagtttcatgaaaggaccagacctcgatcaagtctgagaagcatagacaaggagtgaagatttagtctcgataacaccattcttaagagacgaaaaaaggtaaaagatcgaatcgcatagaatcaaagaaatcttcacatattcagaggaaaaacagcatgtctagcgaacactagagtcgaacaaaagcaaaccaccaatcacacatccttatttgtcaattatttattttggaaactaaaaagaaagttaatgagtaaaatagtttccataagaagaaaaaaaatgttttctgaggaaagaaaatgttttcgaaggacagcaaagtttaagccaataagcaaaacaaaagctgatgcttgtcgcgactgtgttcgtcaagaatctccaggacgaacccaatcttctctctcgaagctgtctaaaattaatcaatcaatcattgagctaatcatattctaggttaagtaaaaacagagtaaaccctctctttttttctctttctctgcctttctcaatttcgtttcgtctccttcgttcttccaatttccgtctgattttatacgaaatttgcattgatatcgaagtaaaatcgaatacccatgattcaaaatttcattttttatgcgactgattcctcaattttgattttccggtgatttctagggttttctattaggtgggtgttatttatcatttgatgggtcatttactgatgattttgcaggtttttgttttaaggatttgtgtagactttcattgctgctacgtttttgaaagggtaatttgaagggcttagcttcccaaaggtgagaattttaactccagtttggcttctgatattgtgttcattgttatgtatttttaagcttagtagttgtgttttaaagttgttccagtttggttgataagtgtgtatgtgtgttcatcagattgggtgagtacagttctttcattgatatctccagttgatttgtgggaattttgttctgtgtgtataggatttagacctcaaatattggattctctttaagcatttaagtgcctggtttcttcatcatcacttgataggaggactttacaaattttattctgaacatggaatttggttagccgaataacttcgtggggattagtttctcgtgcaaggaaattcttcatggttctgtcttggaagtgtttggaatcttgaagcttgatagattttcgatgtaggcatgatgcggttttcttataggtttaaagggtctttagctgagatatggttcctatggtgtgtaataggtttaaagggtctttagatgagataaaactgtgcaaagagttcatataataaatggttaaatcctatatattatctgttcagtgtacatagagaagaattagctgtggaatttggatgtacatgataataacaatgtagtttatgtcttccaacttgtctctgttgtgataatgatcaatgtgtttctattctaactcctgtggtccattgatttttgaatcctttgtccaccttagtactttcttcgaagaaggcatgggaaaatatgattctctggtccaactttcttaagactgtctgcatctttggatccttagatttgtctacgggattatgaattatttgacttttgataccgattagacaaaagtcttacatttcacacaaataagagtttgcatcattgtagagaacaacattgttttcatttctgcttcagtgtttttgagttgaaatgtaaacacctctttctcttagattagtttgaatggcacttgagctggtgtgacctacattcattttgattgtttactttgcatgctattgcggtttagttatgattatattttgtttcaggcactaggtggcaatcttatccaagatgaacagtcaaaatcctgatgatcatgtaagccagctaaaacacctttttgccttcaaccaactaatcgagtaatttccagtctcccgctcgatttttcaatcttttatcgttttcttaaacataggaggacacaacggttgtgggatttgaagtacctgtatcaccggtttcaagttacaacaatgtgtattcctcaaccgaagatgagacaagagatcctccagcagtaccgccacaccttcaacactctctattaggcaatcagggtagcatggaactggcttatgcgccacagaatgttgtcctgaaccacctctatatcgagaaccgagacgccccaagatctgttgtagcactcggtttctcgcatcggttcaggactaagtttgtcactgtggtgatatacaagcctgtccaaagaagagggagcgccaatgtttgaataatgatacctctttttaagtagtgttgggaatttgcttctttatggattgaatttggtatacaaaaccatctggtccgtactgaattttattcttctcttacagattcgatttagacggtttctaggtacattcgattgaaatcatcttcttgttcggagtttatataaaatctccatgcatttttattttttaggcccaaaaaagctgatagacgtgggcattgtttgtttgtaataactcccttagattgggtttagttaaacgagcccaaatatcgctaatgaagttctttacttgctcatatgtagtgttaccataaattatttaaatctttcgtagctccaaaaaggaaaaaaaaaaaaaaaaatcttaatcaaaactttctatgtccgagataagttaccaaactaatgctctaaaactggattggatcgtcggatcaatgcattagtctaaaactggattggatcgtcggatcattgcattagttcggtttgaatgtagatcacttatactctcgttgtttttaattaagtgtagttttaaggttttttatttttttttaatataagtgttgttttcacttttctatgcaaacattaaatgtatttaataatttttaattaattatatttttttactggttggattagttgtaattaatgatgtttttataggaaaaagataaattaaataaaatttgtatgttttcttaatttgtgtgcaaaaactttaaactacaaatattcagtaacagagggagtatataaaaacaaagttggtttgtgcatgggagcttatttgcacaaaattgattaaaaaatgggttctggatattaataagactatgattaatatccagaaccctatatttttttcaatttcatcgaaagtttcatcaatgtaacgttaaaacaaattatacatcttacaaccgtcagaaactactttaaatccatgatatcacatatatgaaactaacattattatttgaacaaattaaaaaacattatattacgcattataacattgaaaaacaaaacaaaataactaatatagaataaaataaattgtatccggattggaaattgcttatctgatattttttttaaccgtattttaacttagaacaaaaaaaacagagtgtagggaaacataaattctaccaaattcgaatatataagaaaaacataaaaaaaaattaacaaataaattaaataatggaaaaagcagataggagagctaatggtttagtggcgaatctaaattctgtccaaagaattgtctgacctcccctagctcaacatcttgggaagaatattaatttatccgttttgttcatccgcctaaagagataatttatctgcaaagtttttttatatttgtaaagtcattcggttttgccaagttttactaggtctaggtagattaaaaagtaaattcggtttgaaagttatatttgggttggattactgtccaagttacgggtataccggtccaaattcaataacacatccaataaaattttcgatcttaaaacatcttctttgacctgtccggataggtaaatgtctaaatctctttttgaaattaggtatgaaatctcatagaactagaatgtaactccaaaatgattcttgaacatgagtgtgactagccaagagcataccaaatttaagatcattatgatatgtccaaactccaaatttaagccacacttattttctcaaaattatacagaactatgatttactaaaattggattctctgtctatttttggtatagctattatcctagtgaattagcacaatgttattatatgcgctctctgctaaaagtaaaaaccagctatcttgtcaaaacaaaaataaaaagtttcttaaccaacacatgaaactgataaatactatataatataaaattaacatatatcgctatcaaatcatatatcgtaggtccataatctttcttttaaaattcatatgagtctttttaatttattaattttgtcgygctcataatgttttccctctaaatcctagtttttgtagttttctgctatgcaggtatttgtaaacaacttatatttttggaaatttggactctaaaatatagaaaaggctataaaataaacactgtgatgtggcatatgtgttgtacacctttgaatctgacaataaattactcgatctagtgtaacttttgcatatgagattttcttttgtcgtctatatattactttgtttcaaagtttaataatacaaaaaaaaaagtgtctttcatttgatttgttgacacagagcaaagccaatgaggattcgaaacgttgtaattagtactcatagttggctgactttgtctatcgacataatgtgttgcttctctcattatgagattccattagtacaattttttttttcggcgcatcaaaacatttctattaaatcgttttttttgttctcatcgaatttggtgatgggttaaaatccaaaatctttagacgaaaaagcaatgatttattccattagcattatacatttcattttcacattgaattggaaaagtaaaagaaagtgaagaagaggggaccagacaggaactggggtgatagagtttggtccatggctctgtccttgagcccattggtcacgtggcaaggagtgtcttactggtgcacttttatgaaacaaccatgagtgtcacgtgacgtaccattggggctattggtccacctcaacctcattggagccatgtcattacatttatcctgtttacttttctcttaataaaaagtttataagattacaagtttttgttagaaaaaaaacacacaaaagaattagcctagaaactaacaaaaaacaatgacactggacatacatttgtcgtatgcttaggacaatgaaacatgctttaatcttctaaacgaatttaacaatttcatgatatatatttttttgtatatattttatggatttcacgataggaagatgtctaagctatatttacaaaaaaaaaaatgtcaaagctgattgtttaacccgtttatccgaaaccaaaattaacgatatttttcgaaaaaaattgtttcttccaattaaacaattaatcaaaaaaatagttaaatttatatggggtaaaaaaaatttgttgtgttgtatataggtaggggaaaagaggtggctacgaaatcatgacggttcgaagagaacacgtaataaagaacgccaacttgtcaacaaaatctgcacctatccacttcagactgtacggacttggggtccctttcaggtggcctgattcgaatctcacctttagatacttttcaatattttggacaatgaaaatcaaatttaatggaaagatacgaaatgtggactagataagatatgtattcccttacattatttttataatctgctaaattatgaactaacagttcatatttattgggctaaagaattccagtttatagactaacttttattttagttggtagatatgatataaaccgctcaagacattggttaggaattaggactacacacgcgctaaattcacgttgagaactggctggcccagtgtcaagtggttttctttcgaaattatttgaatttaaaactgttataactaataaaacaacaaaattatgaataaaatacgaaagtttgttattgatagtccgatagaaaagcagattaatatctaaagctatgctaccgttttattcaaataatttaaaaatcaaaattaatctcttatagtctcattagtcttggcacacacaattttaaacaactactcttcacctacacccgaaaaagaggcgtgagtattagtgaaaatggtcattctagcatgtatgctaacacgataacaacgagcaatgagcaattcaatgcaatcaatataacctattttcatgtaattcagtttccctttttcattctccatcagtttcactttttaaagaccacacactccaaaggcatctaacgatcccaaaaattacaaactggctttgtaagctataacaaattaacaactaccaaaaatagttatacctttttattttattttattttcttctaaattctgttatttttcttttctaaaatctagtttaaacacagtgacgtaacttggcaagtgcgtattggtaatgataaaaatattcccatgatattatagtttagtgttagtagtctaataataattgcggtaatcctttttccaagggttttcaaaaactatctttaccctaaaccaagtaacctttatcgaatagatagtggacaattattttataaataataatacttcaaaaaaataatccagagaccagatcctcgtaatagcatcagagttccttgggttcaacaaagtacttcaaaccacctgaatagtgaagagtgaagaccatactttcgagttttctatattatcagtaaacatatacaatacacaaatattaatctggttaaagttactagttaatttttcaaacaattggtatatatatggatttgcttttcctgctaatcgaaataaatatatgattagtggggtatataattatatatataaatatatatagcttttactttctttaaataaaagtcgggttcatccactttatatactccctttctttcaatttatttgatgtataaaggtttgccacaaaaattaagaaatcgttgagagcaaaaattaatatgcaaaccgccaatattaaaactcccaacttcgagagagacacgtccagaatcaagcaccacaccccccattttgttgttttctcttcaactcttacacattgtatgacaaacatattataataactaaccaatgaaaatggtttttttacatgacatttggcaggtaattaaaggaggtccgtctgctaatactttattaggttaaacaagtatgatctataaactaaatttactacacatggtagagtaaatgtagtcaggatccttaactaaagattaattttattcgttattatagatgccattgagaatttgagattataggttttgtttcaagtataatataaatcttattataatgtttaatataagaagctaatacatatatgtatatttgggaatgtggttttcgaactttgcttgatgacaataattttctattcgtgatgcaccaatcgtttcattttgtagacagacatttttcattgaccacttttaacacgtgaactcttctctttcatttctttagttcaattcgaaataaaactgtttggaccattttcttgtgtgcgtaaaatctttgtcttgtagatcttttggtttaaagatcagtttgtgtgcatgttttggcggtatcatcggttttgctaacctgtagtacttagagaaattattgtttctactttctactatgtactccatagattgaattaatatcttttgctacagcttttcttagtacaaaaacaggtttaaggttcactgtgtcccgggttcaaatttctttgagagatgattaattacgtcctgtcgtagtattcatatgtgtacacatagtatttatgccgtcttggatctcaatatgtgtcaacaatcaattttttgtatatattaaaaacaacattcagataattccttgaatctatatattttactatcccatctatttttggatatatatatatatatatacatatatatatatatatatatatatatatatctaattgcaatgcatcgacgacaccggagtaatgcaaggttcaacttgttttgcaaagaccatgctaacacaacaacattccggaatcacagaaaaatccgagtaattttaaagtgaatttaattgacttaccaaaatacagtccatgaaatcaatactgtgccattattgcttaccaaaaataccataactttgtttctagtgagaattgaactcagggcagaaaagtacatattcttttcccaagacaatttggcaatgtttttcttcttaacctaaatagattcaattcaactaaacgaattactaaattattactctttgttttgccactctctttttaattcgtcttaccgtttatctttaagtttctctacgtttttaagttgtaatcactaaattattttcactacactgttaaaggcttaaagcttaccaccaaatgttatttaatttcactgaactgttaaaactttagctacttcaaattgctattctttttgttctttttttttataaggggcatagatccaataatagttgcgcaaataagaagaagtttacacatgtgaagtgggaaagtgagatattccttcacgaggtggactccaagatggcagctcctaactccatttgtcccaactctctttaccataactcaacttctgccaatcaaactctcttcataaaatatttatgcatatattaacatttagtaacaaaaattcaacatatgtatatatgataccaaataaatcaacatatatattattacacagtcacatctcttactgtgcatatatatttagacaaacacatctctctctctctctctctctcatctgtgttctagatctcaccaggtctttctctggttaatatatggcttccaagatctggtaatatgttataaatacgtcatacttaagcttttttcaaatcaaaaatagaaatttgtgggtttgtctcgttttactattttagcagtatatattaagaagttcagatgttattcgatcatctgtttttgcttcccctctgccatctttatcttttagggtttcaattctttttcacttttttcttctggtttggagatggttaggttccaactaagtatacgagattaaatttgacatcttagttacttcaaaattccttcaatcaaaacaagtcatctcgactattccgccatgtttgtatatacatatttatatattatatatatgaaggtacgagtttctagtgtctataaattaagaaggttaagtaccatatagatgatatttgttaagtagtaagtcactcaaagtttgagtttgggtttgagtttgagtttgagtttgagtttgagagacaaaagattactacaagaagattgttaaacaaaaatggaagactaatttccggagccacggtcgttgttggctgctgtggcatcatcaagattcacatctgttgatggacggtggtgattcactctccacaaagttctctatgaaaatgagaatcttgatgatgctgcatcggcaatcaacgactattctttccctctctctctctctccctctgtatagattatttggattccatccagatcttcttcaggtaggtttgtttctacttgaagtttttttttttcacctttatgttaacatatcctcccgtttatttttatttgttatacataaagatctgacaaagaacttttgtgggtatcttgtttcatgtgataacattgagcatttgatctcaggtttttggcagtctttatcaagacattaatagatccacaagcttctatttcaataagtgaacaagagtcacaacatcaagatcagtaaggtaagagagatctacttaaggtaactaatatatatgccttatttcttatgttgccaatcccaccttgcatttccaaaacaacacaatatagttttgttttgttagaaacaaaaaaggatattatatatggaagttgagataatatatataacaggtctatatggaactattgttgtctagcaaagaaaaggttttcaagacacactgtcagttctttgttttgttggttcatgttggctattacattcaaattgagaatcaatcaagaacttgttgggtggaccttacacacattgtaggctaggcatattcagtccaacctatttgtgtcccctctatttacatatttagatttcgtccttataactgatattgaaacaatgaagaatatatactctctttttctctttattctgttataagggaacaataaatctatagcatcatatatactcagactgtgaacaaaacctattcacagttatgagtttcatgttttgtttatgagcacaacctcccaaacttgtttccaaaacaaattctataaatattagtattatttttggttattatgtcttgtagtacatcttgttatatgtgtgtttagtaatgttttctatgttatggagatgtgtgtgtctaaattactttccattagtcattgtagaaataaatctttttttttttatcatagcttccactatgaatcgaatggttttgagcaatgccttggatgacctagacttcgtccataagtggaagccaaatcattctatcagtaccaatatagcaagttggcagctattttcacatcatgatgatatctttgatatgtccgtcaatcacgtatatttttggatatatttttcagtattgccaaatgaaattgttgttttacgaaaataagtacctcaattaatataatatgtcttcactccaacttgcagctatattgctaatcacataagtagtaccactattcatctttgttatctcttatctctaaacattctattaattatcgcttattgttctctcttttggctaatatatttaccaatttgggtccctaaatggactcgatatgttttaatcggaagaattttatgtgtaaatattttgtgttatgattatcttcgtatttatcgaaatagctagtttgctgtttcatcgcttttatatataaatgcaaaacaaaacataaatacattagaatctttgcgtataatggatctgacaaaatgagatggtaatattagctcgaggggatgaatatatgtgtgtggtccattagcattgaaatcaaacgcaacgctgagtatgtgaggaccatttctttatagtcgtatctattattcccaattttctcaaacttcaagcttttaatgtgtttgtcttactaatttggctcagtttactatttatagctttagacgatatcttctttcaagtattttgtatgccgagcaatttttgaaagtgatatatttacaaattgtttttaccgaattcaacaagtttgctctaccaatatagcaattcaatgtcacatttttacccttatcaaaagaattgacgagacagtttacctttgatatagaaaaacaaatatttctctgactacaaacttttttttattgtctttctcactcagaattttctaattattatgtgattgtttctctttctatttatagctcccacaatattttttaatatacatttggattatgttgaaatgattaaagtaatatatatgacacaaagtaatatatattcttaatacgtactgacgtacacatcacatacatgtggataatagataagataggtcgacccaaattcagaagtagagttatgaaaacgttaacgaaaaataagaggaaattattatccacttttaacatttattcacgcatatgccttatcaatatttcagtagcaccaactagcggaatccaatgagtgggcattacaaaatgtatatatatatgatttcaaaatgtcattttttctttttaacaataaagtatgatttctcggttgaaacattgtaaaattatatttcttttgttaaaacattgtaaaatggatgcatattcaataactattacataagattaaattgatatatacgcttcttcgtttaaactgaaacataacatgacagtcagttttatcaaaacaataaacaaaacatgacagtaatgtgtattatgtttatgaactaacaataagaaaatgtgtgtaatatagtatattaagtaacatgtgtgtaaaatatatatatatatatatatatatatatatatatatatgtcttatatatatatatgtgatacataacataatgttaacataaccaaaaatgtttcagcaagctattggttacaagatgagaagaaacataatgggaactgaaattgatgctttagaagacaatcatacatggaatcttgaaactttgccccgaaagaaaaaaaggcaattgtgtgcaaatgaatatattatagtaaaatactgatctcatggaaccatagagtgagatatacaaacccagactcgtggcactcagaaaccgacagactgaatgtgttgattatggagatacatttgttctagtagctaaaatgggaattattctttatagcgagaagtgattggtcagtagatcagatgtatgtcgaacaatgtctttgtacatggagatctcttccaagaggtccatatgagattgcctataataagccattttttcttaagctataataagcctataacttagataataaataaaatgttcggagacatgaaggtgataaacaaatcatgccgttctcatattagaaaaccgaacatcttgccacttttgtagcggccggttcaaatttccagttctgatgaacggagtggtgagtgagccaaagccgccgacgagacgattcgatgactccgcaatgcttcttgaaaaccctgaagacagctaaacaaacttatacattctcaatctacaagcttctcctcaattcttcctctataaaccaaactcttgcttcaccggaaacaccactctccgatctcaatctctccactcttcgccgtattttatcagacccagatatcaaatcctggaaatgcatctcccttttcaatttcatcctggagaacccatctcttttctcattccaacctgatctcagaactcacttgtctctcactttccgtgtcttgtcggagaggagattctcatatgcgaaagaactcttgaagcctgtggctattgatgacattctcaggtacccttttaatgtaatcgtctctagcgttattgatgaatgtggttgtgagaagaaagttgttgggaggttctttaattcgatgattatggtttattcagacaatggaaaatttagtgaagttgttgaggtttttgagtatatgaagaacaatgaagttaagattgatgaaaagacttgtactttgcatttgttgaatctcaagagatgtgatcagatggaactagctagagatttctttagtctaatggttgagtcagggattgatgttgttactgtgtactctttaactgttgttgttacggtgttgtgttgcaatggggagattacaagagcaagagaattggtggaggagatggggttggttaaaggggttaaggctaatattgttacgtttaagtcgatgattggttgttgtgtgaaaagatgggattttgaagagttggatttggttcttaagttaatggagaaggaaagtgtgatgcttgatctcgatagttacaaggttttgattgatgggtttactagttatggtaaggttgaagaagcagagaggttggttttgatgatgcatgataagaagttaagagtggagagttatctgtataatttgattatgaatgggtactctcggtttggactagtggagaaagtgattgaactatatagcgaaatgagttctcgaggtgttactccgaacaaagatacgtattgggtgttgatgaatggactttgcaaagctgggaaagtttgtgaagcgatgagttttttgaatgagttgcgagtgaatgagtttgagattgatgaagaaatgtatagtacattgagtgaagagtgttacagagtaggaatgatagataaatctttggaagtggtggctgagatgattagggatggattcattcctggtgctacgatatgtgaaagattagctgattcgttgtttgaagtaaacaggaaagaggcacaaatgctgattaccattgtggttaagtgtggtattaaaccaaaatcgtgttctcaatatggtctgaaatgaagatgtggtcgtagtcgaggaagacttatcttctttcttattacctaaagagtgagatgacacgcctttcccttaccaagtctccaagtccaactacaaaaacttaatgtcgaagatatggtaatctagctgactagctcaactaagactcaaagatacacatgaagtatagtgatgtgcacatagttgttccatacctccaaaagatacattctttgaaagatttgtggttccggatgaagatgaaagggaatggtgacaggagaaggattgatatggggaccgaggacgaggaacgttagtttgattaggtccatgttgctaactctttcatgacaaccaaaataaggtcgagggactacttgaagattgaaggtaaatcgcaaaattttgaatctcataacttttttttctttctttttaatactataacaggagaacaaaatattagcaagcttatggcaataatattatattttcgtttaaaaaaattcaaaattatgttttgatagaatttttgtcaccattttagtcttttgataaaatcatgtatatgtaatattattttcccttatatagacttcatatcttcaatattttccttgataacatttcttatattatcttaattgtgatatttaataaaatatagctctttgattgtattattaattattgctactaaacttaagattttatttttgttatttggaatgtaatctgttatttctttatataaatataactaattaatataattatatatatatgtaatgtaatctgttatttctttatattgatgaaacttaacataaaaaaaaacaataaatacattgcattgtgtctgaaaacccaaaaatattattcgatagcaatgtctcttgcaaccacaatgatcgccatctttcttcaaatcattacatattttctcattaccaccacagcctcatcacctcagggcttcactatcgacttgatccaccgtcgctccaatgcatcttcttctcgagtctttaatactcagctcggatcaccttacgctgataccgtctttgatacctacgagtacctgatgaaactacaaatcggtactcctcctttcgagatcgaagctgtcttagacaccggaagcgagcacatatggacacaatgtttgccttgtgttcactgctacaaccaaaccgctcccatattcgacccttccaaatcctcaaccttcaaagagataagatgcgacacacatgatcactcttgtccttacgagcttgtctacggcggcaaaagctacaccaagggaaccttagtgaccgagacagtcacgatccattccacttcagggcaaccctttgtgatgcctgaaacaattattggttgtggccgcaacaactcagggtttaaaccgggttttgcgggcgttgttggtctagacagaggacctaaatccctcatcactcagatgggcggtgagtacccaggtttgatgtcttactgttttgctggtaagggaactagtaagatcaattttggagcgaatgctattgtggcaggagatggggttgtatcaactactgtgttcgtcaagaccgcgaaaccaggtttctattacctaaacctagacgcggtcagcgttgggaacacccgcattgagacagtggggacaccctttcatgccttaaaagggaacatagtgatagactctggaagcactctcacgtactttcctgagagctactgcaacctagtaagaaaggcagtggaacaggttgtgacagcggttcgattcccgcgcagtgacattctttgctactattcaaagaccatagatatctttccggtgatcacaatgcatttttctggcggtgcggatcttgtcttggataagtacaatatgtatgtggcatcgaatacaggaggagttttttgcctggctattatatgtaatagtccaatagaagaagctatctttgggaacagagcacagaacaatttcttggtgggttatgattcttcttcactgctggtttctttcaagcccaccaattgttctgctttgtggaattgaagtaacaaaccctagagagtctcttttccatcattttcaacttcagtttgtttttctcggttaacttcagtttgttatttatatatatcttatcaaaataaaagcatagaccatggatatgtttatatgaataatatgcaaagttacttagaatctgtatatttcttgcattgatatgggttgcttaaggattggcaagattaacaccttccaaatgataatattaacaagtttgtagaaaaacagaaagaaacctataatacgtaaagtctcatattccaaacctctttagagccctagcagccacaagttgtgataattaactcctcccaccgagccgtttgagccctctcatatgttcaaatataacttcagactctggtgagataccataggtaggagatggttttatggcaagaagattaagttatccaaaaccaatatctatctataaaagtatattttgaattttaggttcatcaacaataactttagactaaaatttccaagaaattatacattttgctatagcaaggtgatcatctaatttccattaatacaaaaagtcaatctaaaagaatgtaaaacctagagagaaaaataaaacttagtagtaacaaaatgtaaaattcccccaagttagaagacgtaatggcaataacaaaattgaacgaagttgacaaaattgaaaacttaacaattacgacaaaaggtctaacatgtataaatatgtgcatgaattaatgaagaacattacattgtgtctgaaaaaccaaaaatattattcgatatcaatcaatgtctcttgcaaccacaatgatcgttctttttcttcaaatcattacatgttctctcttcacgaccactgcctcatcacctcacggcttcaccattgacttgatccagcgtcgttcgaattcatcttcttctcgactgtccaaaaatcagttgcaaggagcatcaccttacgccgatactttatttgactacaacatctatctaatgaaactacaagtcggtactcctcctttcgagatcgaagcggagatagacacaggaagtgacctcatatggacacaatgtatgccttgtactaactgctacagccaatacgctcctatattcgacccttcgaattcttcaaccttcaaagaaaaaagatgcaacgggaactcttgtcattacaagattatctacgcggacacaacctattccaagggaaccttggcaaccgagacggtcacgatccattccacttcaggggaaccctttgtgatgcctgaaaccactattggttgtggccacaacagctcatggtttaaacctactttttcgggcatggttggtctaagctggggaccttcatcgctcatcactcagatgggcggtgagtacccaggtttgatgtcttactgttttgctagtcaaggaactagtaagatcaattttggaacaaatgctattgttgcaggagatggggttgtatcaaccactatgtttctcacgacggcgaaaccaggtttatattacctaaatctagacgcggtcagcgttggggacacccatgttgagacaatggggacaacgtttcatgcgttagaagggaacataattatagactctggaaccactctaacctactttcctgtgagctactgcaacctagtaagagaggcagtggatcattatgtgacagcggttcgaacagccgaccctaccggcaatgacatgctttgctactacacggacaccatagatatctttcccgtgatcacaatgcatttttctggcggtgcggatcttgtcttggataagtataacatgtatatcgaaacgattacgagaggaaccttttgtctggctattatatgtaataatccaccacaagatgctatctttgggaacagagcacagaacaattttttggtgggttatgattcttcttcacttttggtttctttcagtcccaccaattgttctgcattgtggaattgaagaaacaaaccctagagagtctctttttgacctttttatagttataacttctatttatttgtccgtttttaattaaaagcatacgacatagataggttttaatgaaagaatatgccaatgagttacataattaatcgaaattcaaatcacaatctgctataaaagtccaatttttttctcaatgcttcttatagataaacatggctaacgaaatcactaataacgcaaaacacagaattctacctaaatacaaagctgagttttggtttagccactcacagcttgaacggtagcaatcatgtgagccataacgagagcgtaattacgaacagcggtgtgttgtggagtgtagttgtctccaagtccaaactccccaaagttaagatctttgttcacaaacttacccggtaacgaccttttagccagagcttcattccatatctccaagaactcctccatcacttttcttgctatttccattgatgatataggaagatactccacctgtaaggatacacacacagcctttagttcaatgttcaatgtctatcatatctgtcttaaacattgtatatatagtatccaaagagataacaagaaactctgttaacaatatacaatctagaacatgaactttgtcaactaaacgcatcaaacattgttatgcacctgtctcaattgctcaagctctaacattttaaatagcatcaagattcatcaccaaaagacagattacaggaaatacattaacaagacattgttctagatgcatcaatttgttcaattctcatattctgtcttaacattgtaactaagcatcatcaccaaaagggcatgaagattagaagaaaacacctagatttccaatgacttagaccttagatacggagattttctagagtttaaaggagattttctggtatgtataaccctttactctttctctctttttttgtgactgtttgatttcgtttctttgttatacgtttgatcgtcttgaagttggtttgagaccttagcatcgttttcattcattcaagttttgattttttgctgaagtttgttaattttctctcccattatctatgttttgctgctgtccttattttatggtatatgaatacgtctcttagatggttttatttgaacatttaattgtcctcgttgctcttcttgaacatttaatctgattacatgaaatggcttcgcaggcatacatcattaccaacatggagcaattgagtttttggtcttcatgagaagacggattaacgatggtacaatctactgcccttttcagattatttctcaaggtatttattgacatagtaaattgttttctttataacttattgtcaaagtgttgaaatatcttacgttttttcagctcatcgaactcacttatatattcgagaggatactccacaatggtcatccatcaatgcaagagttgatcaatttgttttttgtttttggagcaaacaatcaaatttattttcaaattgattttagatatttattttatttttgttaaataatttgatagtataaatattactccctctgttcctttttttttattgtttagaaaaatacacatattaaaaaaacatattaaagttaattttaaatgtattgttttttgtgtgtttacaattttctataactttaaaccaataatattcaaccatctttgttaaagtttacaattcattaataataactaataaatattacattgaaaacctaaaaaatcaatcttttgaaacatatattttttttagaaaatcaaacaaaaatgaacagatggagtattattcagattaatagataatgactatttataattttgaatttaattttcgtaattaatatattattgaaagcaatttaattatatacatttttaattaattagagattcataggaaacaattagtaagaaatatttttctacgaatatcttggtagaaaatcggtcaaaattttctttccattgttttaccaaattttcaatgaattttctaccaatttattttcgtaggaaattttctaccactttcgattttgtacagaacatttgctaggaataattttggtaggaaaatgataagaaacagccgtttcctacgaaattggtaagaaacagttgttttctacaattttcttacgaaattggtcataaaaaattataatttccattaatacaaaaagtaaatctaaaagaatgtaaaacctggaaagaaaaataaaacttagtagtatcaaaatgtaaaattcccccaagttagaagacgtaatggaaataacaaaaattggacgaagttgataaattggaaaattaacaattatgacaaaagctctaacatgtataaatatgtgcatgaatgaagaacattgcattgtgtctgaaaacccaaaaatattattcgatagcaatgtctcttgcaaccacaataatcgttctttttcttcaaatcagtttatgttttctcttcacgaccacagcctcaccacctcacggcttcaccatggacttgatccaccgtcgctccaatgcttcttctcgagtctctaatactcagtccggatcatcaccttacgctaataccgtctttgataactccgtgtatctaatgaaactacaagtcggtactcctcctttcgagatccaagctatcatagacactggaagcgagatcacatggacacaatgtttgccttgtgttcactgctacgaacaaaacgctcctatattcgacccttcgaaatcctcaaccttcaaggagaaaagatgcgatggccactcttgtccttacgaggtagattacttcgaccatacctacaccatgggaaccttagcaaccgagacaatcacactccactccacttcaggggaaccctttgtgatgcctgaaaccattattggttgtggccacaacaactcatggtttaaacctagtttttcgggcatggttggtctaaactggggaccttcatcgctcatcactcagatgggcggtgagtacccaggtttgatgtcttactgcttttctggtcaaggaactagtaagatcaattttggagcgaatgctattgtggcaggagatggggttgtatcaaccactatgtttatgacgacggcgaaaccaggtttctattacctaaacctagacgcggtcagcgttgggaacacccgcattgagacaatggggacaacgtttcatgccttagaagggaacatagttatagactctggaaccactctcacgtactttccagtgagctactgcaatctagtaagacaggcagtggaacacgttgtgacagcggttcgagcagctgacccgaccggcaatgacatgctttgctacaactcggacaccatagatatctttccggtgatcacaatgcatttttctggcggtgttgatcttgtcttggataagtacaatatgtatatggaatcgaataacggaggagttttttgtctggctattatatgtaatagtccaacacaagaagctatctttgggaacagagcacagaacaatttcttggtgggttatgattcttcttcacttctggtttctttcagtcccaccaattgttctgcattgtggaattgaagaaacaaaccctagagagtctcttttctatctttattattattttcaacttcagtttgtttggttaacttcagtttgttatttatctatgtcctatcaataaagttttaaatttttaatgaataatatgcgaagttgcttaggcgcttgagttgaaatttatatttctaggcatggattggtttcttaaagattcttattaatgttgtattggcaaatattagcaccttccactacacgtttgtaggaagtagtctaacttgtctagaattcttaatatttttttttatgttactaatctttgcaagttgattaaaacatataatagcagataagtagtctaagcttgcccattcgccaagcttccatagaattttcatatgaacaaaaggtgagatgttgttgaaaccctaggaatatctttcaactcctcgatgatcacctcttgatcttcaagatcgaagggcagagagattgttgcggtctttaaacgcttagagttggctaaaatgtatgtcaagaatttttccccttctactctatctctatatcctttccactcgaatatctctagctgcgatgacaagcatccgggaacaagactcggttgattccatcaaaatggaagatcctcggttttgtagatatatctctgagaagcaataaggggtatatattaagcaaaattttgactagtattttagtccatcaaagctagaacaagaagaggaggaagagaaggatacatacataatcatctaccaaaaattcttttagttttggagcagttccaagtcaaagtacgagtggttccaacgagtctgatctccctgtatatatacttaactttacaagaatatatggattgtgatgtcctgtgaaagtattgaagataactgaatatgaaggaacaattgaagagctagaggaaatgagacatttcatagagaaactgtcatgtcttgtgcttgtcaaagttcgtgcctgtgcaataaacgacaaggagaagtatcgaatcaccggagatctgctaatggttcgtagatcatcgaagtgcaatatccagatcaagttttatgagaaaactagtaaaggcatgaaaaaacattgttccctcctagtttaatagtatagtaagttggaacattattcagtttgtacgcatatttgcttattgttctgctaaactactctcgctacatataaaatgtttggtcgcatacataaccattttctgcaatttccattggacaaaaaagatgataattatttctcgatactgttaacaaactactcatattcccccaaaaaagaaaaacattgcagataaatggggatgacaaatgtgcaaaaagacaaagatgccattgtgatgataagatgttgtgttttgattacaccatgagaccctcaggagcagcagcagcaggagccttgggtttcggtttgtcaacaacaatggcctgagtggtcagtaccattcctgctacggaagcagcgttctgtagcgcacatcttgtcactttagccggatcaatcactccagcttcgaacagattctcatatgtatcagtcattgcgttgtacccattctcccaatcgctgaacataatcttttccacaacaacttctccttcaactccagcgttctgagcaataagagcagctggtgacagcaatgcctgaactcaaaacataaacccttataagataactagtcacaattggttacagaacaaatactgaaccgaaaaactaaatgctaccttttgtactatgtcagctcccaaacgttcatcagcatcctcaaaagtctccttaatggcgggaataacagtggagagatgcaccaaagcagcaccaccacctggaactatgccttcctcgatagcagcaaatgttgcgttctttgcatcctcgatacgaagcttacggtcctcaagctcagtttcagttgctgctccgactttaatgacagcaacacctccagatagcttcgcaattctctcagcgagcttctctgagtcatacacagaatcagtctcgaatagttctttcttcagctgagcaatccgagcttgtaattcgtccttggaagctgcatctgcaatgagggtagtcgaatctttgctaatcgtgacttttcgggcaatacccaattgatctatggttgcgttttcaaccagtaagctcatgtccatggctaggtactcagctcctgaaaaacatacaaaatgataaaaagtttagaccataacagagagaaagtaaaagtactaaacgcacgcgaaatctgcatatacctgtcaagattgcaatatcttgaagcatggcttttcttctttctccaaatcctggcgctttaacggcaacaacattgaggacaccacgaagcttgttcacgacaagggtagctaaggcttcaccagtaacatcctctgcaataatcaacaacggagcacgaagctgagtggtcttctccaaaatagggatgatgtctttgatcgcagtgatcttctgatcagtgatcaataccctagcattctcaaactcagctagtagtttctcagggtttgtaacaaactgaggcgagatgtaacctctgtcaatctgtaaataatcaagttagtcattggcaatgaatggtgaataaaattacagttgaagagaagcaagacaaaaaaactcatacctccatcccttcttcaacttcgaccgtggtctcaaaagaagatgaagattcaatggacaaaacaccatcaggtccaactttgtcgatggcatcagcaatcattgaccctataaggtcatcatttccagcagagatagaagccacagctggaaaaaaaaaaaagaacagattgatcagtaaaagaaatcaaacattgctgcatcacaaggaaggtcactgcaaagttagtacctctgatgtcatcacgacctttcacgggcctagctttcttctgaagctcttcgatcagaccttgaacagtcttatcaattcccctcttgagtgaaacgggattcgcaccagaagtgacgctcaacaatccatgtttgattatctcccgagcaaggatagacgcagtggttgtcccatcaccagcagagtcattagtcttactcgcaacctaccacataacaacaccagattaccgcaccgtataaatagcattaacagagacaataacaaagctacaccaacctcacgaataagcgctgcaccagcattttccatggcattaggtaactcaatagctctagcaatggtgactccatcattcacaaccttaggacttccaaattcatccaacacaacattcctcccttaagaataacaaatgaaaacaccaagataagtcgaaagataaataacacagatgaagatggaaagagtaaaggagctactaatattaacaaatacctctagggccaagagtgagaccaacacaatcagcaagcttatcaataccagcttgtagagcagctctagagtgctggtcaaaagctatttcctttacattagctctaacactaaaacgtctgattgtcctcttgttgtagctaactctctgaccttgctgctgatttcctcctcccaacttactctgtatacccacaacatcaataaagcagattcattaacattaatctcaatcagtttcttctaattcccataaaaattaaccttttctcaccaacccagaaaccaaatagagaaaagcaattgaattgaaacagaacaaactaaagggtcaaattcaatcactttcttcaaaaacccaataaaccagatagagaaaggtttttgaaaatagataacactgaagggtcaaatccaatcaaaacaaagtaatgaaagatgattcattttcttctttagtaagtagctaaggaaggtaaaaaggaacaaactttgtacctgacgggaagaacagaggacggaggcggaagagagagcgtttgcagacgccattttgagagaaaaggagggagctttttgaggaacgttctggattggtgtggataaggaagtggttagtgtaaacgaatagtgtgggaggaggggttagggtttattagataaatggagagagtagctgagagaaaaaggatccagaagattctttgcattcgtaacgagagaaccgttgatcttaataagcctttttcacctacttctatgggcctgtttgtctcactgtttatggcccaataatagaaacagtactcaagaaacttttatagtttgtgtattccaaattcgtttttatccattctcttactgaatgtactcactctgttttaaaatataagaggtttaaggtaaatggatacatattaggtcattttgtatataaaaaatagtatttagattttgttaaaaaaaatgataatgaaaactgcaaaatataaatagtcacaaatagtcaaattaaatttaaatttaaacttgtaaaacatcttataatctgaaacaaaataaaatccctaaaacatccaatataatgaaacaaagggagtaatatttagaccaaactaataagtacaatttaagacttgtgaaaaccatgagattataaaatacatgttaagtggatgaaaacacctagcttagagtagatttacccgctaagtaaaacagaaactctcataaagacaacagttactacttttctaaacagagaatagactccaaatcacctaattgctacatgattaattgatttagttaagccaatacaatttgtttctaaatcttttttcatataagtattgcttgttgtacgcatcatataccatgcattaaattagtttcccatgaataaattcactagttacggaaaagaaaagttgggaagtgagataataaatctgacaaaagtggcagtttcaactctgaagcgtcaatcacataaatagttgcagtttggcgttgggtttgatttgattgagtgaattgaccaaataaacacacttaattaataacaaaagggaagttacgtaacacaaaaattataaatagggacgtctacatgtattattcctcaaaagatgcagcttaccataagatgacgtccatatctttaatggaaaccgtgccgtaaaattgactgccaaaatgtacaatgtagaaaacatgagtaaactaacagttgtcctgatgtacaaaaaaacacactaacagttgtccgatgaaaagaaagagacatgtaatttaaagcattacgacaaaaagagtaaataaataacactgttgttaacttgttttagtaatctattgtaattattttcttgagtggttgtgattgaaacgaaacaatttagtggactactaagcaaaaatagttaggatatatagagcatgcaacaaaagacatgcaaaaacataatttggtttgatgttttgcatatgtgtttatagttttctaaaacttaaagtgcctcatataaacaaataattaagttaaaagtgtattaaaattctgaaatttaaccacattcctatgttctatatgaaaaaacaattattaaccattaaactaccataaaataactaatactttatagacttatgattttattttattttattaaagaatttagttaaaattaattttagggccgttaattttattgttttttagatattccgtagtttattgcatgtttcaatttgtataaaaatgtgtttcatttggatattgatacatgtgtatcagtttaaagaagaaaataattttcgtggaaaaaaaccgacaaaatagatttttaagagagtaagtacagtaccgtgtaatagaaagactgataaaacccaccttaatacgtcaagaaaaaaaccattacagattttacggctttacgcaatcattattctctctcagtctctctcagtctctctctctatctcccacggtcggtttacatacatatctaaactcaccaccggagctccgacgatttttccggccaccttccgatcggtatgtgttgtgttcccttttttcttctgagatctatctgtctttatcacttccacttaccttattcattttgtttctcctcgcgagtatttgttttgctcatggtacttatagttccaaattgaaatcttgacgattatgatatatattaccaaatttaaatccgaatactagttatattctcacaccttattttttgttttcttgttcttcttctctttgttgttcttgaagtttcctagggttttgttcttatataaaaagtattattttctgggtgtttttacttcgtccatctctcatttcgtgttttccctgttttttttgtagtttttcatttggaaatttaattaaaggtcgtcgttcttttgttgttattgttgttggttatatagaaattaatgcatatattatgttagctaaaaggtccctgtcgcatgaatctttatgttcttgtaaactggttttaattttggatctttaagttcatgttagtaagaatttcattttttttgaacagtctaacgattattccattcatacaactcgcttttgtagtttctgtgatcataaaaaaaacctcttccaatttacagatgtttattaattaatttgctatatatatggaactcatgcatatttaatttgttggtaatttcttatgatagaatatcaaaaggtacataaagatggatatgataaaaccagattttcaacaaatccgaagagataagtttagagttgagcaaatgaatgattttcccaacacttggactcagcagcagcatcagaacatcagaattcccaacaaccttgatttgattggtatcttacagaaccagatttccgtaccggttcaaaccgatttgtatcaagattctgccgcaacctttatgaacatgcctcagtcgatacatagagacccacaaggccctagtaattggagaatcagtgatttgtcacaacctagtaccgtgaatcacggatatgatcaggctggtattaggccaaacaacgttgcagatttgttgtccgatcatttcagttctcgaaaccaaatattggaccgtcctctttatgtcggccgggactctattcctcagtctagcatgattaggagaagtgaagtttcttgtctagacgataatcaaaagggttgtgtaacggtggcttgttcgggtactggtaatgagattttaaggagcagttatgatcaaggttcttcttctggaagttaccgaggagaattttcgtttctcccaagtttggagaatcaatcagttgcgcacaatgcaagcaactggaaccacggaccagtgaatgttactgccacttctcatactaatagtaagaaaggctttccactctcacttttgtctgatatccctccatctagagacgttggaaatgcagctgttttgtcaacaatgaatattcacggcccactcgggcctttcacgggatatgcatcgatactgaagagttcgaggttcttggagccggctcagaaaatgttagaagagttttgtatctcttatgcttcaaagattattagtagaagtgaatctacttccatggaggatgatgatgatgatgatgataacttgtcagggtttagtagttcttctgagccattagaacccaagaatagactaaagaaagcaaaacttctctttctgcaagaagaggtttgtgaaactatattcttacacagtcatgttttaatctatagattcgttacaaaactaacatgttataacttgtgacattgaaaaggtttgcaagtggtacaaactatataatcatcagttgcaaacagttatgtcttccttcaatacagtggctggtctaaacaccgcaacaccgtatatctcgttggctctcaaacggacttcacgaagtttcaaggcccttagaaccgcaatagctgaacatgtgaagcaaatctcaagtcactcatcaaacggtaacaacaacaaccgattccaaaagaggcaaagatctttgattggtaacaatgtcgggtttgaatctcaacaacaacatatctggaggcctcaaaggggattgcccgaacgtgcagtggctgttcttagagcatggctctttgaccattttcttcatccgtaaagcctcacaatttttttgatgtaatttgattttatttgatatgatgttttgatgtgatttctcatatcctttattgctaatactgttattaggtaccccactgattctgataagcagatgctagccactcaaactggtctctctcgtaaccaggtagctcaattatgtaattctttgtttggtgaaacttttaaatatgcttgtctcttgaattattgctcttggccggtcctgttttcttctattggtttaaagcatgttgatgggacaataacctaatggttttagaatttcttactctcaaataacatcaatcttatatgttaaagtaaagcatgcatatatagaattagtctagattttatgaaagacaagtgcatgtgtaactaaaaactgaaattgttctacgtgtaaatagaagattaacttttttcaaacatttccaccatgaaccatgtcaggacaaagagcgtctcattatcctcacatgcaaaaactctttagtatagacttcacctaattttaggtttggtttttgacaagatttgctgacttggtttcgtgtttttttttaaaggtatcaaattggttcataaacgcccgtgtgcgattatggaaacctatggtggaagaaatacacacacttgagaccaaagcaattaaaaatgcagatactagtcacaacattgagccatcaaatagaccgaatactgttagcagtccgagccatgaacaaacgctaacgggcctctccgggacaaaacggtcgaggttagagtacatggacatggtggggttcaatagagggaacgtgtcactcacgttagagcttaggcgtggtgtggacaatgttatccaaacgcagactcaggatcatcagtttggaactggaagccaaatgtttcatgactttgtgggttgaaaatcctctgcttttgtttcacctttatgtattttgggtagagtgaaaataacaaagttgtcttgaaatggttactcctaacttagggccacaaagttctctgatcacctttttagttattttttttgttaaaaacctttttaattatttcttttatgttatactaagattaagatccgtcccttgtgggtttaaaatttttaagttaaattaaacttaacaaaactttgatttttaaaattttattgtataacttgccaatttggctaataaggagaggcagtccaccagacaacgagtggaaagaatgatagggtgggtggcaccgagtgtgggctggatgaagttggtgaagttatccgagatatagctggaggttcgtgtaaggatttactctaaatattggtcgttgttcggctctcttggcagaattgtgggggaggaggggagggggttattatgacatgtacatcgcgtgggagaggaaagcgaactttttggaagtggaagttaatcggaggtggcggttggatttctcacgacatgccacatccgctgtcttttttggtatatttgcgccatgacggtatatattcaagggactgaattgtccggatttctcatttgtataagaaagctaattaactcgcaaatgataactaactatgctattttttacagctaggttatcattttgattatgttccgccaattttagagacacttgttagtgataacaagactgtgaatacgtgtcctaaacaaacttttatatataataaactcgggagacattgtgtcccaaatgcattacatcaaaaaaaaaaagcattttacgtaaaaatttatttattttgaataattatgtagaatttttaaataatttttattattaactatagttaaattattttctatcttataataataatataatatttaatgttttaatacttaatataattataaattatatttttttgatcattttcgatttaactgttgttgtacctaattgttaactagtcataaaacttccgcaaaacgtatcaattctcaaccgctaaattaaacgcatctgcttcataatgcttgaaacaacaaccgctcatctgtacaaactacaacagtcgcaaccacatctactacgtataaaccagtccagccctaaatttctacgtgaaattgaccagttctacacaatacatctcacatatgaaatccttccttcatgggaaataaaaacattttgctacattattttcattttacacaaagccatgcaagtaaccaaagtatgcttcgaaagcttaagacaaaacaaacaagaaaaaaacatccaagattttgacaagacacattcaaatcctatacagttcatcgcaagaaaaaggattccaagctacagaatatacttctataggggttaaatcataaaacaataaaagtatatatgcttctaagaaataactcaaaactaatgatattagagaaaatttcgaataaaaatacaacagataaaatttcaaaaaataaaaataaattaagtcttcttcagaaaatcaaaacagctttttcaacttcttctttatctctcccttctcttctggtgataactacggaaccctaatttcttctccttcttcttttggttaggataagcgaatccctacaaattgaacctttaatcgcactcgttcatagatatgaatccataactacatcgatgcgttttctaggttttcgacattaataggaagttaagggattgattttacaagttcttgcgtttgaatcgatggcgaaaggtacggctactggagaatttgtggctgtttcacaggttcgtactgggtgtaaaagagaattgcaatttgttttgaaatctcagtctgagatctgtggtggtgagtctttaggtcggactaggggaagtagaaacttgaatggtgagtctagaagtgtggaggttaagaaatcgattcgcgcgtctggtttaaagagtgggattaagaagatgcgttttagtaaagatgaggaagttggtgaagttgtaatgtctgatactgttggtgttggtttggaggaagaagaagttaagagtgatgttattgatgttgactctgctttggttgaatctatgagtgaagataaaggactagaagagaagaatgatgttgagattgagaatggggatgataatgtggtgatgaatgaggatcacttacttgagcaaactgagaaggtttcagagaaggttatagaggctgagaaggtatgttcgattggaggagacagtgttattgatagagaaatagttgtggcatgtcctgcaggtcttagtgtgatggaaaaaatggcttctagatcttgtaaggttaagttggaaagaggtttggtctatgcgaaaccctgtaaaaggttgacacggtcgatgctgaaggttgagggtatcaagtctgaggttaatgctgatgatgatcatgtaaatccagaaaaggatgctataggtagtgaagataattgtgttgatgtttctggttcagtggcatatgtggtggaggaggagcttcttgagcaaaataatgtggagatatgccttgggcttccaagtagatcatcccagatgaatggtcattctctatgcctcgggcttccaagtagatcattccagatgagtggtcattctcaaggtgttgataagaaggcagtgaatgatacagtagataagccattgaggaggtttactaggtcattggtcaaacaagaaagtgattcagacaatcctaatttgggaaatactaccgaaccagcagacttggtcgatgtagatatgcatgccaatgatgttgaaatggatggttttcaaagtccttcagttactactcccaacaagcgtggcagacccaagaaatttctaaggaatttcccagcaaagctgaaagatatttttgattgtggaatacttgagggactaattgtgtactatgttcgaggagcaaaggtatatggtgacttcttattctattcatgtaaaaacaaattttatttagctgatatgtatgtcaccatcctctcgtaggtgagagaggcggggactagagggcttaaaggagtgataaaaggatcaggcgttttgtgcttttgtagtgcctgcataggaatacaggttagtgatatcttctgttcttaaaagtcttgtaattggtcctgccaaatgctagctggttgatgtaacttttaaaatttcatttcacaggtggtgagccctgccatgttcgagttgcatgcttctagcaataacaaacgcccacctgaatatatcttactggagtctggattcacacttcgtgatgtcatgaatgcatgcaaggaaaatcctttggctacactagaagagaaacttcgtgtggtagttggaccaattttaaagaaatctagcctgtgtttgagttgccaaggttactgattagttcattggtttgtgcaacattatacagactgttttcacttgttttttttttcttttctcttctctttataaagaatttagactggttacatccaattgattgcaggtccaatgattgagccttgtgatacaaaatcattagttgtgtgcaaatcgtgtttggagagtaaggagccagaattccataacagtccgtctaaagcaaatgatgctcttaacgggtatggctcatctgtcttcatttatagctacaaccttttctgtgcagttgaatcatgtgaaagtaagatgagcacgcagttatcttgttcagttagtttttcagactgggtggaaaataaaacgaaaaagccgctgatatttttccgaaagaatattttctaattatgtaatccgaaaaaacattttctacttatgtaatgtggattacgagctgtatgttcctttattatatggttgcttatgtagaattctgctagtactaacatgcatgactttatttttggatatatctaatacaccactaaatatgttgacctttatctacaccacagttcgtctaggccaagtgtggatccaaaatctatccttagaaggtcaaaatccagtcctcgccaaagtaacaggcgagaacaaccaaccagaaagtgagtattgttgttatattgatggttgtgctttctagttgttacgttttgtgtttttgctgcctttttatattgtaattagctcacaatctaccatttatcattctggaaaatgagtaaatgagaatataatattggaaatatggcatatactctttagttttacactggggttattggctaagcttaatttatcttggggttctacaggtcaactgagccaggtgtggttccaggaactattctgagcgagtcaaaaaacagctcaatcaaaagcaacagccatgggaaactaaccagaaagtgagtagtgttgttataagtgtgacagcacttatccgatgtatatatggtctagtgctagtctgctagattgtcgacttccttgctgtctgtctaacttatattagttctcagtctatcttttgtcattttgaaagggatttgcggctgcacaaacttgtttttgaggatgatatactgccagatgggactgaagtaggttatttcgttgctggagaggttagatctgcatgataattgtcttttctccagcccctttttgaaacttttccttcgccaaccattttgttcattgtgcagaaaatgcttgtcggctataagaagggatttgggatacattgttcttgttgcaacaaagtggtaagctctctttaatgtcaattagctttcctggcattaaagtatatagggggtttgaatcagcctatataatgtttatgggaccaggtcagtccttcaacgtttgaggcccacgctggatgtgcaagtcgccggaagccgtaagttccttgcaactatttccatatttatgctctagtagttaatgggtttgttccttttctgattttttttttaaatctccgattctgatataattaaattgtagtaacgtaataaaataatttgctgaaatacaagagattgaggattatagtgaagctactcacattctccttggaaacctgataaccagaaccattatttcttcgctcggccattgtattgtcaaagagtaaacataaacatttcttcccatggttgcaaaaagtaaacatataaaacttgcacaattagtgtaaagttcgtggatccttaagatcattgattgtacgattcacagagaaactgtttaaacaactaattcatcttctgttaatgatcaggtttcagcacatttatacaaccaatggggtttctcttcatgaactatcagtagcactatcaatggaccagaggttttccatccatgaaaatgatgacctttgcagtatatgtagggatgggggtgagctcgtgtgttgtgatacctgtccaagatcatatcataaaggtttggtatttgcagttttccatgtttgtttgttggaattcttctattgctacttttaaaatgtttttggagcgtgaacttgatagagcttatctgtctgttttggttttatctagtatgtgcttctctaccaagccttccgagtgagaggtggtcctgcaaatattgtgtgaatatggttgagagagagaagttcgtggatagcaatctcaacgccattgcagctgggagagttcagggagttgatgcaattgctgagataaccaatagatgcattcgaattgtcagctcttttgtgaccgagctcccaagtgtatgcgtgttatgcaggtgaatatcaagcttttccattatttctagtctcttgatgtcttccttcatagtgtctcattaaaaatgtttagttgagaagatgtgtattggctaactgaaaccatttgcttatgagactgacctttgcttaattttctatgttgttgcagaggtcatagtttttgcaggttgggctttaatgctcgcactgtgattatctgtgatcaggtactttgttgttcattgctgtatagggttccttgcctcttaaatctgcttctggtcttcaccatttttggttttgttgttttctcctcagtgtgaaaaggaattccatgttggctgtttgaaagaacgtgacattgctgatctcaaggttctttgcctatttagctctttcattccctcgggtgaaaactcagtatctatctttctcattcttgttatgtcttaacaggagctacctgaagaaaaatggttctgttccctcgggtgcgaagagatcaacactacattgggcaatctgatagttcgcggagaagagaagctaagtaacaatattctgaattttttaaggaagaaggaacaacctaatgaagaaaactgtccagattataaaaccactcctgacataagatggagggtccttagtgggaagttgacctcttcagatgataccaaaatattgcttgcaaaggcactttccattcttcatgtaagtcaagaccacatttcaaactcttctgtcctttctgctgtttgtcccttctaacaattgtatgctataggaacggtttgatcctatcagtgaatctgggaccaagggagatttgataccagccatggtgtatgggtaagcaattttgtatcttcaatcagtcgagtggattattctttgtgctgatcaacaacttttgtgtgtggaacagaaggcaaacaaaggcccaagattttagtggcatgtactgcactatgttggctgtggagtaagattcttcttctttttcactctaatttattttctgtgacgcatgtttcatctttttaatgttgtcctttttttgtttcttgtgcagcgaagtgattgtttcagtgggaatctttagggtttttgggtcagaacttgcagaactccctctggttgctaccagcaaagattgtcaagggcaggtaaacagtttttatctggaaccttggatgttttttctttacaacaggtgcctactcctatagaatggttaataaacgactcactcttactgtcaatcccatacattgataaattatacagtgatacatctaagcagacatgtttttgtgtcgaatagcttaagagcagaacaatgtgtagcatcttaattgcagaaggaatttttttgtgtcaaattgtacctgggggatgaaatgcttgtgattgctcttttttgagagtttgagaatttatgttttttttttcctattgtagggttacttccaatgcctgtttgcttgcatcgagaggctacttgggttcctaaacgtgaaacatatcgtgctaccagcagcagatgaagccaaatccatatggactgacaaatttggtttcaccaagatgaccgacgaagaggtatatatctatatccatataaacttatatacactcccaatgaatcccatctctgatacacactgtgtttgtgtgttattaggtgaaagaatacagaaaagactactcggtgatgatctttcatggaacatctatgttgagaaagagtgtaccagcaccgagtgccgtgagtaaaactgaggccagtaaggaggagtaagctcaaggttgtctttgttttttggtttttggaaagttggtgaaacgattggatgctcttttttaatctaatttcgggtagtagccacgttcttgtacaggtttctcccctaacgtgtctttctttgtaatggaaactagagagaaagatacacaaaagggttagagaatttggttttggtagagacgaagtagagataagagggggaagtaaatggggaagtctaaaacattagggcattcttttgggggtttagtcatgattatccgaagctaatttttttttgtatattagtgcccaaaaatgaaattcaattttctgaaatctttttctttttgtcactgatgtttatatatcgaacaaaggaggtatacaaagccggcgagtatacggacacctgaactctgactataagaggaagatactgatgcctttagaaatgaatctctgaaccgggaattataccggtttgattaacgtcgaaccgtaatcaaaattttagggctccactaagcgggaaggagcgcctctaagaaatttgaaactcaaaaaaatcaaaacacccgttgagaaaatgcccctataaatccccataattacttccttaccacaatgcctttttaattccctttcgctttccctcttctcccctaaaattcatttcgtttccgatcgcacttcttctcaaggtctgctttacttcccgattcttagattagggttcgatttctgatttgtttaggttctcgtcgttgtttagggtttagattactgacagattgctccatttcttttgtttagtaaatttaatagacgtttgttgggtgatttaagaagatgggtcagatccagtactccgacaaatatttcgatgatactttcgaatacaggtgattctcagtttgattctcctcccattttaatggagttctctctcacgttttagtttcagtctaatcgcgtggtcttttatttttctctcaggcacgttgtacttcctccggaagttgctaagcttttacctaagaatcgtattctttcggaagtaagttaaaaattagggctttcctctattcgctgtataacccttgaatcatcgtaggctaagagatttacatgtttaagaaattaagttaggaaattgaagtttggacttttgagagtcgaagaaattgaagtttctgcttaggaatttgaagttttgcttctcattaacttgtttattaactttaggttgtgtaattgtcagcagtgacgaagatagtttagatatttttttgtgttatcagtcaattctcagttttctgattttgaagttaacagttttcttgttttacaatctggttttgtagagtgaatggagagccatcggagtgcagcaaagtcgtggatgggttcattacgcgattcatcgtcctgagccacatatcatgctctttaggaggcctcttaactaccagcaggagcaccaagctcagattgctaagtagaagaattatgcaaaattctccctaatctctgtttatgtctctcgtaaacgaggttttaaaatactactctgatgttttgttcctgtagttttttttattgtgttcatgaattctcttcagtggagaatcatgtgagtttggtagaacaacttttaatgttatgttaagtctggtcctttgctagactttggttggatccacgtttgaacttcttcatggttaagaatgaagacgttatttctcatgcttatgtgcttgtttcatcatttcaacctctttttattgctcctcttagagtcttaagtccataactatgaacaacaaacaaggtatcattacaatgccaatctgaaggtctaatcacgattctcatggcgatactgattcaaagaaactcatattgtgtctcaatcaccacattcaccaaacaccatatattccttactgtactactattagtgtattgaaaccaggagattcagagccatttttataaattaactagatatgtatcttatacctagtgtgaagcactgattgttggaattaaatgaaatttcgagaaaatgaacgagttcgtagtttgatggtaaataacaaggtctttggtcaaagcaaccaaacaagttgttgaatttaattagaaccaaaccaatccacccaatttcaattcattttggtaactaaccggtttataatcattcatacccaatcggcgtcttctaaagaatttcaaaactctaaaaagttaatcaaacacccctctatttcctcataattacatatctaccccaaaccactttattctcctttcactatcttccccaaatttcaaacgatcagattacagattcttcaattcctctttcccttctcctccatttcctgattaaggcttcacatctctgagagagaaatgggtcagatccaatactccgagaaatacttcgatgacactttcgaatacaggtaaagctcttcaatctcgcttcttcttcctccaattttcactctcacttctctaatcgtaatcgatcgatacaggcacgtcgttcttcctcctgaagtcgctaaacttcttccaaagaatcgtcttctctccgaagtaagtttttttccgcattgttctctgatttctgattctaaatccttcgattagatcatcgaagactatgaaaatttgttgctcttaagaaattaagtttgggaaaaatcgaaaaagagatcgtttaggtttaggatttgaatctttgctctgaatccaaattgcaactgttacgattttgaatctttgctttgggattttgtaaggtttagtgataaagagattttagacatttgtgttgtgcaatctcttcaatgttgtattgattggtggtgatggtaaaaatgtttggaatttcgaagaacgaatggcgagcgataggagtgcagcaaagccgcggatgggtacattacgcggttcatcgacctgagccgcacataatgctattcaggaggcctcttaactatcagcagcagcaggagaatcaagctcagaacatgcttgttaagtgaatcattatcatcacctgagtaagaatgttatatgcaacaattctatgagtattggtttatgtttcttgtaaacatggtttgaatctttgtggttatggatgaatatgtgagagttggtttgttgaacaacttctatgtaatgttagtcttggttctaatgtcatcttctgcttcttaattacttatttctcaagacatttggtggtagtttagtgtcatccaactatgtgtttgatttttagatatattggtaaaatggtcactggataggcatgagtagttgagaacaatgtgtcccatgtttccactcaaccatgaacacaaatgaaagagaaaaagaaagtttttgttgataacttttacgctctagttttgtagaataaccattgtttttgttgataacgaaagtatgaaacttacatttcaatgaagaacacaaacgtagttgctatcgaatcaaatcctcaaactataatggtgttgaatctggatggaggtttgagtaaaaagatacatgactcgaaaatcaaattagatgttattgtggttatcatggttttcctttttgtgtggctaaaactttacattggtaactttcttttctataattaggggttagtttgctagatagccaaaatctggaacatattttggaaaatagtttcaatgacaaaattgtaaacagtaattactggggtgtcgttttgttttaagatgtattaagtgtgtaaaatgtgtgtcatagtgttaaatagcactcgtccataataaatattttttttatatactgtataaactataaagcaacatttactttgtaaaaataaagtgtcatcagattaaataaagatttgtttataacatatgcaaagaactgtaatggtaaaataaataaaaaataaaaaaataaaacatgtggaaaaaactgtaatgttactctatgattattttgcataagaaaatgtttaggtcattttgcaaagaaactcctaatttttggctatagattgcacatatactaattaaaaagcccaaaaataaaaagtcgaacttgtaccaatccaatctataatagatttggttttatttaggttattagcttcctttttttctgtttttttaacacataaagaactaaatctatgttgtacattccccctacttcaaaatgatatgattagaatctatatatacatttttgcagccattttaacaaataaatcttagaattgaccttatttacaacccaatgccactagcattaattttgttttccaaaaaaattaattttactttaaattcttaatttaaattgttaatcatattatcaatcaaatttaatccaaacaaactttacatcaatcccttaaaattagcataaacgtatttgttaacaatattttaaaacaaagttttttgtttaaataaatattatttttactaaacgttttttgtttaaataaataaatcctgtatttgaacttatttacaatgtcatgctactgtcattaattatttagaaatgaacatatttaattaacgatttaaatcttttaaatctttgcttttagagttattaggtcattacctaaaaggcaaaaaatatattttttaaatattattatttatatatttaaactttataaaacattattaatatttaaacttataaaaagtttaatatatcaaaaaatttaacatcattatataatatatagtttaaaaaaatttcaaaaaaaattccgtcatattttgtgattcaaaattttaaaaatgaacatatattaaccaattggcaaaaaatgtgtgggttcaacatcccgcatcgactaaaatatttagacaatgattcataaataagatcaatattaataaaataaatgggtttttttgcaggacgaattttgcgggacgggtttggcaggacgttacttaataaaagttgtaaatacaatttataaatttttatatatactaactttaaaaaataaattgtttccgcggtgtaccgcgggttaaaatcttgtataatatataactggagtagagatcactgaatagtaaccaaatgatatcaaatcgacgaaagatattgataagattcatgattttgccctacaaaaaagtaagataagagggttcaaacacatggagaaaaaaaaagaaaagtacatgttccaataaaagacaaatcaaagttatatgaacaaatatctagttgatgttcttattcacttgacgcttatgtttgctctttgatgtgataagactcaaaaagaccacaccaaacaaagacagctcaatgtctccttaaagcctttaacctaacacatgcacaatctttcttctttgttttgatgaggtaaacatttgctttcttgttcatttgttttgtgttttctttagtgattgtattgtgcccatcagtctttttaaccatatcaactttttgatatcacttgtatttcacaagcatttaaactgaattcgcatatacttcttttttactaagaatttttaaaccgtatgttagggttgacatcgtaggagaattttaattgtgacaactatagtgtgtaatcgctaactcctaatttacgagagataatacttagtatgatcaaaagagtggtggtctacacaagacttagtatgaattgacattagaaataagaattaaatttaagatcacttgagtttgtagattaattgatttaataagacttttgtattttctattagaaaacacaaaagttgatgatttggtcatattgcttgctttagatcaagtacttgatacataactgttgaacgttgcttcggtggttagtaaattagccgtcggccgtccacacaaaaaaaataattttttttatttttataactccaaaaaaaggctaaaatattttttttaaaacacataacaagctacaagaaaagttacgtttttgtaacaattaaatgacatataaaagaaaatgttccaattgtccaaaaaaaaaaaaaaagaaaagaaaatgttccacaaatagtcatataccaaattcaatttgtctcaaacaaaatttcatactgcctaattacttgtattaaataagtgaattatgcttcctccaaatttgttggaactgatattagttttaactttgaacattaatgcatgtatatttgaagttaatgaaaattacatatcaacgtaagtcattcaccgcaccctccattaggcccctccaatatgtggctgagtggtgctacgatcattaacacgctcatcttaaatatgacttttaaaaaggctttttagaaaatttaaagtatcatgattatcaatctatccaacatttaaacaaaaaaaattatgaacatggacggcgataaggtgagaaaaatgactttgcaaaacatacctacaaaatgtgaacgacccaagtaaaaactttatgaaatataatatagcggttacaacttcataaaatttatacaaacaatttattgaatttggggtaaaactcagctctttgttcactgtattactacatcgtatataagcatcaaaatcgtggagaaaaagttgaaagaaattgagattcttcattgtcgttgtttttaatacttgaaaaactcatgattaagtttagcaccataatttatatactaatataattttattttacttttcccatctacaattggatagtttttattaatttatgaaaagaaattgttatgagttagtcaagatctactttttttttgtcttaagagattctttatataataacataaacaacattacttcacatcaatacccttaaaaatgctatcaaaaaaaaaaaaaaaaaatgcttttcaaaaaggtatttggaatccagagaaacactttagatatcttatttatccctttttcagttttttgaatgagaaagaagctctaaaataagggcccatgatttagccaatgtgcctaatgatatctaaggttctattaacattggccatattagcgaatggtcgggctattaagcaacattgaaactttaacttaagaataatatgattgagtctctattgaaccaatgtggttcatgaaaatagtctttaattagactattagactatgattaaggccactgacaaattccggcggcagatcaaaaagtcattcaaactaattaacatattttattttccgggaaattggaaccaagctttagcttttcttttcttttaatatttcgttttcaaaatcatacgctattatagatttatgcatcgttagtggtcttcccttttctgttataatcattgttttgaatctttcagtctatatggtcacgccatatcacatcttctcactttgttcttctttttttctctttatgagagaactacataagaaattaaagaagataagttatatataatcattttcatatatagaactttcgattttagagcgagatacatgcacttcctcttatttcgtttttctttttagaaaaataaattggtttttgttgcactttcgggtgtaagtggtttcatccacgcttctatatctctcaaaacattcgacagaatgtaatcagattttgtaaggtacgcatatgagtagtttggatttatgaaaaataaacattttataacaaaaacaagaaaatgaaacctttgatacctttgatgtcaatatctataattctgtctttttattgaatacatgcatgcatcatttgtttaatcgacgtcacaacttatttcttctcgtgaagttttctcaaccaactttgtttttccattaaaaaaataatattaaataacttctataacttatataggcatacaacttgagagaaattcaagccatagcaaaatttatgatggatttgtgacaatataacaacaaaataatattagtttcttaaaaaattcgatggttggatgtgattgtgaaagatcagtaacgaacatattatagcacattacactcatttcttgataatttgtggtccacaaggagaagcttttaaaaattgattacattaattaccwwwaycacttacacacatttaactttttcgtagtcwwttgwaagagractwwwamcactaaaagtacatttaacttttcgtwrkycattaaataaaaattactcaattttkragtrgrawwwtgttgcatatctccttyctcatacttggcataactcgtttggatcatcttttagagttttttaaaattatccgataatcttttaaagttttttaaaatcatatatttttatcaaatgttgggtttgtcatttcgattatctatcttggtkrayctccggttctccgtcatccaataatcttctymaataacttgaacgtsktagagacgtggactattagaagaagaggagagaacaactcamcaacacaaatgaattaaacaaaagttgaattgatatttttaatcatcaaaacatacaatatagttaattcaccaccaaaagggcacaaacacgaaaccgtttttagtgattataatacttagggttatactagatctactttttactgcaatcatgatcatttattattagttaatggtacaagaaaatctaattctacgatattacccaatcttccacatcaacaacttagatgttgcttgtcttttttctttaaactcaagacattcaataacaacacttataaattcatactaatacagttttttcatacttaccggcaacggaaagtttaataaaatgtatgcttatgaggcaaatattagccacccaatacttagaaaagctttaacaactaattcgacagtgtaatgattttaggttctgatcaggcctctccaccattcaatttaactgcggcgctgtgtaggactccacatgacatcaattagttggaataagaattcatataatgtaaaaattactataaactatgttcctttacaaaatgctactaatgtaattgtgtgttcttttttaatttgttgctttttccgaagttgtactaatcagtattgctcaaagaaaatgatagtcaattaatcatatgcattctcaattttgtcatctaattaattcgatagtctaaatgaaaagaaaataattaaaagtttgggtgaagactgaagatgacaaaatactaagatatattaattagttttcaaataaatgtcattttagagtaataattatgtttttgtttgtcaaatttttactcttgctattttaatgtactttcgataaggatctttatccattgcccctaagtaaaattaataatagtgtaacatataatacattgatacaagtacaaaatgaattttattttgtagacttaatcaaatatttaaatgagtcgtgtaaaaatgacacttcatatgaaatgaaaacaaaataaaaaatgtgcatggattacattactcttattggagattttgatatgaatctgatatcaaccccaactccgaaaattaggtatagtataaaatctaattctgtgattatttttttcatgttttaaaaacttgtttaaagacaaaatttatcagattcatatcaaaatatgcaaaatatcgtaatatttggattgatagccaaagtccatcgatttagagaaaacatatgagatcttcttatctagattttgttccaaatatctaaaaattgatatgtatccaaatcataaatatgagtttattttgatatttttctttatttatatatattttaaaataatactccatactagttgaagccaaaaagaaaaaaaccaactttgggaagcatgatacgtgtcaatcaggtattagtcggtagtctatttttccccagacgttcgtgttacggtaagattttcttcccgaagaagcagagaggtccacatgttcctcctctccacaattcactcttcttctctttcgtcttctcttctggttaaattctctctcggagctgaccgtttcttcactcctaaatccaagccacaccatattgattctcttcactggtaggtttcgttcatgacgtctctctcattttgtgtttcccctttcaagctaggtttttatttgttaatggcggattctttgggtttttggcttcatcaccaacactgattactcctttttcctttctggagctctaattttgcggatttggttttcgatcggattttgtggatctttgtttatttcagatccaattcaaggtttgtgttactgttatcgagcgtataaatctgtgactgcgtaaacggattagaatgtgagatttagggttcataatcgcttcataagtgtgatcgggaatctgatttttttttcttttttttcgccatttttatcagcaatcgagcatagagtcggtaacctgattgatatagagatcatctgtttgaaattcggatttgattcatttgaatggtgaatattttcaggtgcttgcttggagctaagttttaacctcacggaaggaatctttattctgcaatcactgcaaagagaaggagtctatattttggtggagaatgttgttggacgataataaacatatgatttcagtgcaacgcggctttaagagtcgtggtcagatgaaatatctgaggtattgaaattgatgagcaccataggagatgatctaattctatctggagaagccagtttttgtgtatattttgtagataattaggctttttgctaatacagttaaagattgatcaaatggctatcgctggtctgcaaaatattttggtgatcgattcatctttccgtcgggactctgaggttcaggcgactagacaaagggaaaatgagggaaggtcaagcgtccgggcatcctcactcctacagatgtggagggaacttgaggatgatcatgtgatgggtcatgctcgtgagagagatggtgagaggaggagtgtttcttcaccatctaatactatgaggggaaatggttgtgacagtaatattagtgcacatgatattgttagagatagtgttaatctgggtgagaatgaacttggtggatggtctcccacccagagtcatgttgggtcacataactcgagtgaggatctcggcccttttcagagcgagcatttttctgatctggggatgggtgaaagggaaagagttagacagatttttcgtgagtggacgagctctgggacaggtcagcatactgattctgcttcccaagcaaccaacagctcaagagcagaatggcttggtgaaactgaacaagaaagggtgaggatcataagggagatggttcagatgaatagccagcagaggcctgctcttggtgatctcagggaagaacaacctattgaaggtgctaatcagattgaaagagtacttgatggaatagttgttaatccaaacagcatccagaatgaacatgctagaagaggcatacgcaagttgtgtggtaggcaagtgtgggtggatatgttaaaaatggctgagatggaaaggcaaagagagctggagggattgatgcagcatcatgcagtatcaaacttcgctcatcgcaaccgcattcaggtttgctcattagactttgtgactgtttcttacctctcagttacttgtctcggtgacattgaatatgtgatattgttatctttaagtaactattcccaaataagaaaaaatcaatctgtgctatattgtccaaaaccactgtcagatacattcacaggctactcaattaccgatacattcgtaaagattgtgaagacgccccaaccttcctaattctatgttgtgctatttgtgtatgtggaataaatacaggaacaataattagcattagttctttatacaattataagcatcttgtgtcagaggaacaatgactgaaagtctagtagtcacttttttttctaaaatgaataacgaaattcatagtcgaatgggggttggagacatacttgagggagtttatgatagcttctatttcctgctatataccttcctttcccgttttggtcattttatacttcctcttaaggggattctaacttgacgtttgtgtcataggagttgtagtgatagatatgctgagcatctctttatattttatatgatatctttttgtctatcattaccagtcagcttaactggcacattggttgtttgaaggcgttaagagctaaatctatgtctcaactctatctcttgggttttggttggcatagctttaaatcatgatttgaattacttttgcaggcattgctaagggggagattcttgcgaaatggtgacaacgatgataaagagaaaccaacatcatctgcagccactgagttgggctttctaagagagaggcacactgtatctgagctgaggtagttaattcttctgtaataataaattctattttagaggtgttaaaaaggtccttgcttactgtgtgtttgtcatatgctagggaggaatttatatccagactggaccggtctgcctctggtcaagcgagcagtagtcactctgagacctcatcaaatgctgaaactgatcataatagaggtgaacaaaacgacctgaattgtctagatagcatcaatgatgcagacggtggttcagatcaaaatggccgagaggctgacaaccaaagttcactggatgagataactaactctggacggtgttgtagccggagcacaagtttggaagaaaggactgcacgtgtagaaggctggcaacggtcagaaattgatgatttttctcaaagaagaaatgatacggaagtggacctgaatgctactgggtgttcatcctcttcaattcatggagatgagatcagatacggttgtcaattacgagaaactatcgagataccctatgaacagtctctgcaaatttctgaagaaattgccaccatgggaccgataaaccggacaacaaatttccaggagaatctgggcgaaagcattaacctaactgtcactctagaggaacaaaccgtggagcagatggaaaacgaagaatccgattggcaacttatcaatggtgcaaccagtgcatggagagatgacgctgaagaggaggcagatacagatgttcctgagaattttccaaatcagttatcccagttatcatctgtggacgaggacagagaagccaacatactcggggaactcacagagatgcagcctgatgatgatgctgcatctcttcaaagcacaatacaagactggtcagaggaacattctgatcaggacacagtttcaatgggaagggctaccacattctttcctccggatgatggtaatgagaacaacatggaactcagagaactctcgagcaggtaagatatctagtaaatttttgccgtaatggcgacgcttttcaacctcattttatgtatctgatggcttgctatgggcactacaggagacgtgtctcaaatcttctgcagagcgggtttagggaaaatcttagccagttgatacaatcttacatggacagacgaagccaaaatcctgtcgactgggaagaagccgagacttattctgaccatacaatagtaggtgaagataccgaacagcaggatgatgctcagagtggtggtcaagaacttgatgctgttgaatctcctcctttgactctaccctccccagtcatccctattcagccacggtgggaccatgatcgatcccattcaaactggccggcacatgatttgcatcagggcattggaatggtaagactagtcccaaacttaatccctagggtgaagggtgccaaagcaattgtcttttctaaagatgaaggaactcattggttgatattttatatgctgttgcgcttatttgttaacttgatcaacaatatctctgcaggattgggattcgatcaacgatttgagggttgacatgggtagaatacagcaaaggatggataacctgcagaggatgctagaggcttgcatggaaatgcaactcgagttacaacggtccataagacaagaggtctctgctgcgatgcaccgctctactgaccaaccaggttttctattagtctcaagtcacattatgaccttacatatgatgattcacaagtcacaacagtatacaacaaagaatgcaactattttttttttcttgtggactcaccttaatcgattcacaggtccatccaaggacactgcgagttacgagtcaaaatgggaatatgtaaggaaagggatctgctgcgtatgctgcgagagcaatattgactctttattgtataggtacgtatgaaactatgaaccatgaaaacaccaacatttgttttaaacatgttcccaaattgatatctaaactcctctgttttttttttcttgtttcgttcgtaaacaacagatgtggacatatgaacacctgcgagaagtgtgcaaagaagctagtggaagcgggaggaaaatgtcccatgtgtcaagcccctgtgattgaggtagttcgtgcttactctattctttgaaactcttgtgctctcctacggctccaagctctgcttatttgattctgggttttacagatatcaaatgtctttgattgtgatgtttttagcatagatatttactctgattcactcggctcttaattttatccgtggtgtaagaaagacaaacacacacttcttaactatttttatacacatgaaacatcaaaagattcaatagaaattggtggcagtgaactatctgtgactacctgtacttttatgcatatccaaaaaaaaaaaaaaaagagacatctaaaaagtgcaacacttcagatgacacaaagaaatgagcctctgaagccgtgtttgacaaaacactacgaaattgtgtacgtatggttgattttttggggataaataaattggttgattcacttgatgctaacaaaaatttcgtttccacacatttcgcttcaatttttccgtttccttccacggaaaatagtaatacaaaatcagaaactcataattttgttttattcttaaacatctcataaaacaaaatggaatgaataaaataatattttggcaacactaacaaaatttactactcaatctcattttacaaagtcattatttcatacccttcccttattacaacaataatacaaagacaaaatcaagattaagaacaacacaaaaaaaaaagaacatgtcagaggctcagcgatcgttccaatccagtcctctgccccaaacttgaacagctactacacctccttacacaagtgtccacaccatcacacgtgtcatgttcttctgccgagtcctgatcaggcggttcttgcatgcccaagtccttatccgagaacagctggttactccggcacaagggacatgttacgtatgagctcagccacgtgtcaacgcaatctacgtggaacacgtgaccacaatgtggtatcactttaactgtttcaccttcttcgaaatcgctcaagcagataacgcaatcttcgttccgctgcttcgctgctttcgtgtaacggtacactggcagagatcgaacggcctgaaatgtcccaatcttgccggttaacataagaaccgagaaagataattagagaaatggatttacctgagaatcaagacccctccggaaactatacggccgtgatacgacgacggatgtggaaaggcgacgtggagacatcctagaggatcttgttcttggcatggaagaaatatcaaccgttgaacttgaactgtctgcgaagtggcggaagtaaactgaaaagaaacccatgaagaagagagcaaccaagaggataaagatggtgagagccatagtggagtctaatgccgaaggtggctgtggtggtggcgttggagtcaatggtgatgatgtgacgttttggacggtttttgtgagctcttgttcgccaccacaagcttggtagagctggagaagcttgcgtaggtgcttggtctccatcactgaagtctattaagaaacaaaatgaaattctcattttcaatttttattacttgacaatgtaaaatgactcataacattaacgtacacgtatgcacatgttagtatttaaatattagtttaactatatgaataaactgatatatgtgtactcatatttaagaaaacgacgtaaatgaatgttaatggaacgaaaattgggttcattttttttattcacctcacctaagtttagccaataataatgaaacaattattgggtggtaaattttttttatctcctctaaatttgaccaattgagagagagtaaaaaaaaattacatttaaatatagctaatcaagaagcttattatggtatgatcctattggcaaacgatataaagtatcaaacataagaaattcactttatggagtatctaatgaagaggaacatattatgacattaggaactcggaagatgtcatggagaaaactgaattgtccggaaaaccattatcctataggtgaaggggtatgcatcgatgaggttttgtattacattgctggacaagcaaagactgtgaagatagcttgctttgatgttagaaatgaaaattttagtttttttaagacagattctagtattatgaagttattggttccatcgtcgcctactaaactgataaattacaagggtaaattaattaggcgtgattagttggcactggtatactgacttttatcccagaaggcttaggtctaagctttatttgtatttgtggatacaagaggatgccaagaaacaagaatggttggaatgtgtatacacttttccggtgaatatagtcgttaagggagatgcttccggcgttggagtgactgctactcatgaaattattttgtccatggactatatatctaaacctttctttgttttctatttcaatcctgaaaggaagactcttgaaagagttaagagtccaaggttttgaagcgtttgaaaaacctactagagtttacacctttgtagtctatgctgagaatttcaagtttataacagaatctagctagtttgcctctaagtggaccttttcatttacaggtttcaattttttttccccaattctcgatgcccttgttttgttgcacgttacttgaaagcaaaatactgtaatgttttagttttgttccacattaattgcttacattggatttagtccccaacttaaacaagttgtaaggaaaaacgtcagaattaaacaaaatacccaacttttggtgactcactcttattgtttaatttcttaatgtaacatgagatattggtataataataattatatattttaagtaaatataaaattaataagaaggtgatatattggtatttatatcccatttatacgtgaacttaagggttccagcactattatttcgtgcccatattccgctttctctcggttgccaaaaacatgcgttaggtttccgacctccacatacatcatgtataaaactctccttcgcaataaacgcgttaaactttacatgatgaacataattaggtccctggaaagatatcgtaataaaaaaatttacatgaataacataaatataaacaagaatatatcgttaaaaaattataggtgtaacaatgtgaaagagataacagtggaaattgaactaccttccatacgtggcaccatatcaaagtttttgggtaaattgtaaattttattctccaaatgacattgaagggaagaaatttaagtgggctcgcttgatctccagatctacaaatgatcatgagttttttgttacctgcaagatgattcgaaatatcaatgtaataagtcctaagtattataatggattctatgttttggatggagatgaaaaacaagaagaagaaacatattaaaaattttcccatcttggttattttatttttcctcattacataataatatttatactattcacacacacacacatatttaatatatttgttaatatatttaattcattatatatttttcctcatatttgttaatatatttaatttcattatatatattcttctctcatatttgttaagatatttaattttattgaaaaaaatttctctcattaatctcaagtgttagtgtaccatccacaatgaatccaatttatttctttggaagctcaccatgtcacggagacccataaaatacatatgtttggctcatgaatggatcaaattaatagtcaaaggtcaagatcaatataaaaaattcaaatagttaagttcaattcacaaattaattaatgaccatgaataacacgctaagagaagacaatttttctctcatcttagtccacaaaaacaaggctatttcaatggatccaagtttcttcaaggatcttgaatcccattggaatataacagacggtcctcaagaaggttgcggtattgatttcatttgtccaaaatatctaaaggcaatctacactggagtcacaagttttttgcacgctcgttcaaaattctagtcacaatctccactttttcattttgatgatgcatttcaggaatagttttctccattgtaatcctattatcagcgcagtattttataaactcaccgcaaatgtactctttaccattatcagatattagacactcaatttgagatttatctcaaccatacttgttcttcataaagtaaacttcatactggagtcatcaatgaaagtcacataatagtgtgatactcctagcgatgcaacataagcaggttcgaacaagttattttgtactagctccaacttcttagatttcaacttcctaccatcactcaaaacctaacccgtttccgctttccaaggatgcaactttcatacatgtagtgatttaatatctttaaatttggagattcaccatttgttaccatgaaattcatacatttctcgctcatatgcctcaatctataatgccacaactcagttttgttttaggcattttcggcaacatcaactatatatatcttcatagttagtggtcatataaatagtgtctcttttatagctttttgtacctgtcatggaaccctttgtcactattcaagctccacaaccaacattgatatcgtgtcatgtatcatcaaattgtccaacaaaaaatagatttcacatcactttcggacatgtctaacctttgtgattttccatacaagctcatctgacatcttcaggttaatgtcttcaacaccaacaatgtccaaagataatccatctactagagatatcttctcataattttgggcaacatagttctccattatgtcctagggagcattagtgtggaaagaggctcctgaatcaagaatccaagaatcgatctgactataagctgaagagatcgatgcttctcgcagtgcgatcaacaaccgcaacatgagcttgacttcctcttggagaattatactaccaatgcattatgcatcaattattacttttgtacaattccacaattctctaattattctcgagaaacgacaacacgtaattcataattaatgttataacctagttttttcttaaagtgccataatatattatgtagaacgtgaaggaaattaaggtcgatgcgtactaaaataagaccatcctttacgtaaaattttaccacttaaattatttatgtaaataagtgaaagtttcattttcttttttaagtaactgtacctttcgaatacctaacgcctacgacaaactattttaattatataacagcttagaattaatgtcgaagaacatttcatgtgtctatacaaaacatatacacattcatgtcccttaaccatttagatattttcccaaaaaaaaagaaaagaaaaaaaaaaccatttagatacacaattattgatccctaaaccccacacaatttcagtctaaactaaaatatttagtagctagatggatatagagacaggtaacttcaaaccaccacatcgattagttattagattatctactcggaaataaagtatacagtatatctccaccgacattctcatagtctaactaatgcctaaattttcatgttattccttccttccacaaagagtctttttgaactcttaatttttgtataatgtgttttaaaggtaagacttatatttcacaaaaattaattagtatatcaaatagagtccatcctacaatcctacagtatagatatatgttatacaattagctagaaatgtatttaatgttttacaaaaaaaaaatatagggaaattaggattttcttctatacaaattgttggttttccatgtgagaggattgtgagaagtgagctggacattgtacaaattgggaatatataaatacacccacccaatacgcatatactatgctatgtttgggtggaccattaactgatgattttaaaaagataaaaataagttaaagaaaagttttattttatttcttgaaaaagattgattaaattaggaggcaaaaggagctctatgaggaatgccttttcgtcgcctagaattagaggtatgagttggaggatgcgtgcctttgtgcgtttcttgttgtctttctttacgcaatctttcttcttcctcttccttattcttcctcattccttcaacctgacatttttattatgatcacatcatacatttccgttatgcaaatgtaccatatactttttttttgagcaaaatgtaccatatacatatatacaaacatctaacctcgtatatattttcttaagatacattatatgaggcaaacaacatgtattaagcgagtttgaatatagttgattcaatgaatttaccatacaagtaactaaacattatacggtgtatccttaaaccgattcctcattttatatcggacaaataaatgcgaagatattagtaataatgatgaaaatatgataaaccaattttgttggtccagttgtaaagtgctcgttagatagattgacttataactatgcattcgtttttctatgatatgaagtttacaggtttttgctcatgatttatccatccagctacaaaaaggaattttgcattgagaaaaggtgtaggaaaacgaaccttgcaacccaaggaacagaagcgaaagggatcaagaagggttctgcaacatgtctcacagaagtaggacatggttttcggagtggaggaggcggcaccatgggaggagttcttaggctgaggtctctcgtttaagaagagaaccctcgcgctattgatgacataagtttgcactcctcttatgtccaatgcattctctatctccgatactctcaccacatcatgatacgacgatcttcttatctgtctcaatgttaatgataaagaattggattgagtcaaaagtgatatatatatatatgtgtatgcattgtgtgttgagaaaatgaaggacctgaaggacgggatgatcaatgtgaaaggaggagcggcagtagaagcaaaacgcagcgttttgacaggagagacagaacatgttgcactcatttcgcggtgtctcgcgatgtcgagggcaaatgctgaagaagtttgttcttaagagaccttcgagccatttcggctcctccattaatctctctcctgttttgtttttcttagacaataattacaatatatacaaaaagggaagagcgagacaaaaccttatgaacaatgtaataaattacgaagaacatgctcttgccatttgcattacctttatgaagatgatcagtagagggagagagaaagggtattagatgattgatttttgagacaagaggaggaaaaatcagattttaagggtaagagagaaaggaagatataaattttattttattgttgataaatgaagattttatgtttttttcttcttatttaggattggtagatatcttttcaattcttctcttaattattaaatatttattgttaatagtttattgggggaggaaagggaaaggatatataattagatatgatgtttggttaaggttgattcctaaccgttggatgaggccattgagtaaatgagtttgatgacaaaattacaagctaattaaatgtgtatatagatcaaaatttgttccaactttgactacaaaaataaccaaaatattaaatgataatactttaaatttaatatatatatatatgaaaataattaaattcaaaaaatgtttctaaaatatatttaattaacatttatgatttgaataatagatttctcgaactattgaaacgtgtacatccaaaagaaacacacattatcaacatatgtcaaattaaagagatcaaaatttgttccaacttggaatttaattataaccaaaaaattataatggtaatactctaattttgacatatctatatcaataaatgaagaagaatatatatatatatatatatatatatatacatatataatttatggtttacctaagaaattcttcaaactattgaaacgtgtacgtccaaaagaaacatacataaattatcaatattttccacttggtattaatcttttggtttgtaaggttgatctttttgttcgagccaacattaaactacattagatggaatgttggctcgaacaaccacattattcaacttagtttaaagagtttcaaacactgtttatcccctcatgcaaaatttgaatctcttttctaggtgatgacattcctcatttcactatctttaaccgatactgcttttgagaaagattacaaggagttaactcggctgatgacggccacgtctgatgagtggtctggtctgtcaaagggtaaatttgtctatcattagcatggtgtagagagaaccttctaatgtaaatctttgactctttgtagtgtcaattgtaaaattgtatatgaaatccctcatcaagtaaaactgcatgaatgatttgttagttgagaagatcgatcatttggaacaaaataaaaataaattaaaatattacagacaaaaaaaaatattacaaacacgtaaactaaagttcacactaatcggtggacctcaaatatgatgggggaaaatgcccgctaattactctttagggagggtgctagcctacgtggttgggcgtgccgttttgagatggagagcatccgatcaggaccagtgtgtcagtgattgagtttggagcccatttcttcttattccttttgagttagttgatatttccctaagtgactttttctattgggcattctaatggacctggttttgaaccttttttgccttcagtttagtatgcttttattaggttaggcgttcgggtattcacatatagagtatagattgattggttctatatatgcgaaaaaaaattaactgacaaaaaaaattatgcgatgtcttgtgctcgaaataaagaataacaattagaaaatacgaatctagggttcaatccatggataattacttggaaaaatcctttaccttgtagaaattgacatgctattttatacaaaaagaaacataagatgtcaatttctttgtgtataaaacatgcaagaaaattatttgttataaaaaatatagaaaatgtgaattcagatgggtttgaatgtgttttggcctgtcacctttttcgtatgctaacttaattttttttttaatttgtttttataaaacaaatatggttatagttagcctaattaattatagttgcgtcgttattattattattatttagtaacaacataatttaaaatcggaatgttttgtgtgaatagatatactatcttggaattgaaaacttttatcaaacttctgacatgaaagctaagtttggccatgtacgtatgagttaagatattaaattgcctgaatattcagatgtacttttttgaaattttattttcctcttatctgttttttagctcaagaaagtgacgcaatactgatagccaacatgtggagtagttgttgcatcgaccttacgttaattccccgaatagctaaatatcaaattgctttatcatctcttactatttgagaataaattcagttacggtatttattaaaaaggataacggacttacgcatgaatctattcgtaatcaatgagtggaaaccacttttttggtgtcatagttgcattcgtgccggccgcatcatctaagaagcaaaccaaggagattgtttttactactacgttgctcttgctgtcttgcaaaagatcaacaagtaaatatccacccataaactcaggcccgatatccaaaatccagtatagacactaggcagaacactataagtagcaatctacacttcatagacaaaaaaggctaatcaaacctagtttcgtcttaagaaaagtaataatctaaaacaacactcgctcaaaaacaataaataacataatttacgtgatgttcttctgtttccctcaaatcgaatgaatccatttttccttgagtggtggaggttcatcggaaataaccataccgatatttttcatgaccacaatactttattccgtcgtacacgtttatctacgatctagcaatcaatctacgaagccaagaaacaagaacagaatgtggatgaccaaaattttgtgctacaaaaaaaattatccaaaaatatcacaacctattgctgtcagaaaaacaaaacaaaaatattaatgttctcttatggaagaaaatatttcttttactttttggttaataattacagtaagaatttagctgacattctatctttactagtgaattttcattatataatatatagtatatatataccaaataaggttgaaccaatagcattgacttaatgacttgacactccataatatattgcttcctatagtgtctttatccctctcaaattttcttttctctctccctctcccacaatcacaagataggaaaattgatccacaaagaatcgtctgaatgaagacaacagttgtttatctggtgattctatgtctcattgtttcatgtaccaatggagaaaccaaacatgtaagaaaaattaactccgatggatccgaagcttggggatacgtcgaagttagaccaagtacgttctttatctctctttcttctaccaaaattttcaagaaatcaattggtttatgttagatatgactaaatgggttttgttttgactcttttttctaaatcaaaatcgtgaaaatagaagcacacatgttttggtggcattataaaagtccatatagagttgaaaatccttccaagccatggcctatcatcctctggctccaaggtggacctgtaagtttttatcttcttttattttacatcttattcgtctttttacacatttgttgtttattgatcattaatgttttcaattatttggttttgatgaaacagggagcttcaggggttggtatagggaattttcaggaggttggaccattagacacatttctcaagcccagaaactcaacttggttgaagaaagccgatcttttgtttgtggtatttttttcgttttcatgtttacttttatttccaccaatattattattaacaaaaaaaaaacaataatactatcattcttctttgatatagagtaaaacaaaattttgttttcaaaagtgtgtaattaattacttttacgtggtatctaatttgatcagtctttaagcttactcacatatgttaagtttttaatcgattatatatatatttttcttgaaaataaaggatagtccagttggggcagggtacagtttcgtggagggcaatcaaaaggatttgtatgtgaaaagtgatgaagaagcagcacaagatttgaccaaactgttgcaacaactcttcaacaaaaaccagactttaaaccaaagccctctcttcattgttgctgaatcttatggtggcaaaatcgcggttaagctcggtttatcggttattgacgcagttcaatctggcaaattgaagcttcatcttggaggtaaagggattacgtgctttctttattttctttttttctctgaataaaatgaaactaataatgtagtagacaaataattctattttataatatgtgtgattaggagtgattttgggagatagttggatatcccctgaagattttgtggtgagtttcatcatttttttaaaacatgttactcttatttatttgtgattaaattatattcatatgatttttattgattaattgttacagttttcatggggacctcttctcaagcatgtctctaggcttgatgacaatggcttggatagctctaataggtctttatcttaatacaaaatcaatttttctaatacgtaattaatttacctctctaatctatatagtttacttttttttggagcagcttagcagagaagattaaaacacaaattaaaaatggtgaatacgttggagcgacgcaaacatggatggacctcgaaaacttgattagttccaaatccaatttcgtcgtaaattatttctcctcttatttttaaatccattagtatgtacaattataaagatttgatgataaagtgagtattttacatgttggttttaatgtaggatttttacaattttctattggatactggtatggaccctgtctcgctcacaacgagtctaaaaatcaaaaaggaagagaaaataaaaaagtattcaagatatttaaatgatatgagaagtttaagtgacgtagaagatgttgaaggagaccttgataaattaatgaatggcgttattaagaagaagctcaagattattcccaacgacctcatgtaagtaacctcttactcttttatagtatcaaactttaatataatcaaagtttagttgttaaatgtgttatattttggttttgtaaaaattaacagatggggaaacaattcggatgatgtgtttacagcaatggaggctgcttttatgaaacccgtaattgaagacgtaataattctttttaaaaaaatatataaaccgtttaaattagtttaattataaaaaaaaactatttaaattagtttgattcgttaatacaaaataaattgtttttttttggcaggtcgatgagcttcttgccacgggggtagatgtgaccatctataatggacaagtaagaccatcattatttataagaaaacaaattatatagttgattaatatgaaagataagaaatcatttgcataattgcaacttgaaatatgaatctaaagaatgagataaattgacatgtggtttatatacgcagcttgatgttatctgttcaacaagtggaactgaagcatgggttcacaaactcaggtaagaccaatctactttttctaagtttagttacattacattacatcatcattctataaataagaatatagtgtatcctcattatgaaaatagaatccaaaatacttactgaatataggcacactattgtaataaatagagaacaatattaaatcactcaacgaatattgttggtattaattataaaaaagataggttgttggtatataaatttgtcattacatgataatgatgatgattatgtgtaaggtgggaggggctagaagaattcaagaaaatggaaagagagccattattctgcgaaagtgacagagcaacaagaggctttaccaaatcatacaaaaatctccatttttattggattcttggtgctggtcattttgtaagtacactctcaatttttatcctttagtaacttctattcatttttaataattatttattcacatatgtcataaatacttcttgcacagccatcacaaatattgccatacagtgaaatattgcatagatatttattgaataacgtgagagatacgtgatgaatctattaaacgaaagcacaagtctcttttgtgtctgtttcatgctttctctctgtcttttttttcctgcattttctttatatcaaaacaaattgtcgactctctttaatactttgacactatctgaatctttatgattcctttatcacattcaatatgcaactgttaaaaacccttacacgcaacataataaagcaaaaatcagacagtgtgacttatgcttttaatggagaatatggtgaatgatttatcaaaaaaacaaaactaatgtttgtttttttgtttggaaaaaacaggtaccagtagatgagccatgtgtagcattaaaaatggttggagagataaccaagtcaccacaactttgacccattctttcttccaaactctcacatcacaatatgactcctttcacatctgattgattttattactcaaacgttaaaaataataataaaagagtctacagtgaaactacctacacatgcttttgtttatttatcactattgctcttttattcttttactgtaattgccattatgagattaaaacagaaaaaaaatgttgatatctacaactcataaaaatggtaacaacaaaaagtaaagccgagctatagttcagttaatttggtaaatccaagtgagaatctgatataacaaatatttaagacattaatcaagtaattaaatggaggacaaattgtgtgttacaatcttcaagaatatacaacttcaggaggatcttttagacaaacttataagtaataacaggtaaaactaccaagaaggggggcctatcctcaaatttacattactcgatacaaatgcaaaagtaagaacagacagaagaagaccagagtattacttgatgtcgcgaagctgccagaagcttctaagattgatctacatagacgctgattcgatcttctcgataacttccagccgcgttttccttttccaacctttcatggtggctactaaattcaccagtccaacgacctgtgcttttgtatattcctgtatattttacaacccatgtttatacatttctatcaactcagtaaaatatatcagtttggattatgcgagaccagaaagaaaaagatttgtttgtttaccggatgagcccttgcccagtgaacatattccgtctctggcagatagtacgcctgcaaagaggagtgatgattttggtttaagccgtaacaaacgtttctgtttttgagtctgcacttacatatgagtttctgttttgcttaccttgataaatgtttcgactatctgtaactttggcttcacttttgttggcacaaagtgctgtaacccatttattagaacctacaagcagatagataatgtgggtcaaaatcgactcatgtgattcaatttatcaattgcagttttgttgttcatttgaagtttctatattagttttgggatgtttatcaatgctgattgaaatttttattattcatgtatacaattactgatctcccgttaaaagagaagaacactggattaaatcaggaaaagtacctgaagatctaatgacatgagaacacgtccttcatcagtacatctttttattcgagataagccttcaaccagcatctccgcaaatatttcaactccatattcaagtaggaggttttggacctgtacatgaaaaaaagtttgaagtgtgtacagatttgagatttcactatagtttgataagaaaacattctcaatctgatatctttatcaaattaaattgcatgctgtctgtcagttgactgattaagcagcagaattatgttttagtttgattatgacatacaaaaacatacaaaaccaaaaatctcaacaggttccaactactgatagggggtcaacttctggggttgatgaggtcttagagaaatttacctcctgtggaatgcctccatgagcaagccttgttttgtagtgtttgaattccccgagcatcaaatcaacatacctgttagttcaaagagtttattacatttaagtatatttcatgattcagttaggggtcatccggtaaacaaacccattatgctccattccaagctccttgatttcccatttagaattagctatccgatcgacatatctgtaaaattagtttaagctgaatgaacatgcatacattcaatgtaacagttttaaaactcctgaggttagtaagaatcgaacagaaggcgcaagggaagagagaggtgcaatttatctaatcacttctttcgaaaacacaagctcataagaagatcggcaatttacccattaacatgcagcagtatcctcgcagttgtcctatgtaagtgctctgtcagatcaggtacggaaccaacctgatgaatcactccttttaatcaaactacttcaaatgtatttgataccacatattgtatatagatagttcttcattttatataggagaaattagtttagcaacgtaacacaatgaaggtactaatcatgtcctgtataattcaatattttttagaggcaaaagactattggatgctacagaagtgtctgtataataagattgtatgcatgttgtcaacagcaaatccaagcgaggcaatacgtccaaccagggtttttcttaaaaaataagatctgaagaggtgcataccagttgaccaaagaagtcttcaaccagagacccatttcttgacataagcattgattggagatgagcctttgatttatgcaatacccgagccacaagagatactgtgtccacagcagcacatctttcctgcaagcgataatccttttattatacaaccttgagatgataagaagaaagcaaggcagctgctcttcttctcacacaatatatcaaatactagagtataaatgattaggatagttatatttagggtaactaatgaacataaaacagtattaactgtagttcaaattgatgaaaacctagccccaagttatataccttgagactaaaagatacgcctgataagtgaccagaagtatttaagggacttgctggagtcacatccgcaagactatgaacagtgttgggaaaggcaagtgaagaagatggtgatgatgaaacgtgaggttttatccattgctcacactcttgtgatatccgtgataagcagcttttcaaacgatctgcatttcaaaatatacttatgttgagcaaaatggctttccgcagatattgtagccttaaaagtcataacacgactcatactgacactggtggggagtaacattacaaacaaagaagagcatcaaaagcaaacgaatcagtaactcacgattgaaagagtcggaaactccttttccacctgaattagtattttcttgaccaaatacttgaaacacgaaatagaaaaagactccaaacaattggcatattccctacaaaatttcaaacagacgtaagagaaaagttagaaatgaaatcgagggagcagagtagagaaatctacgaatttccaagtattaggatttgtaccttaaagaattcagcattaacaatttctagcttctgcataagcctcgcgtacttatccatagatctaagacatcgaacacaattaatgcaattccatgtcataaaagtgccagggaaaatatgcgatcggaaggctgtcattataatttcaaacatttcctaaaccgcatatattaccttagaagacaaagggatgatcctgtttgagctgtcaaatcatcattagtactaaaatgtgaagaagaagtccttgattgactacgtgtaaaacttcgtcttggaagctggctatcctcatcaataaagtcagcaagaaggtcttcgttttcatcttctgaaacaggactacctccgttgatgcgttttatgtctcttatcttgggattcacaacatcatcatgaatactatcattcccttcatgatcttctccattgatcgaggagtagtcttgatcttctctatagtgagttaactttgctgagaacgggttcccacttttcagccaatatgaaaatccactcctgttgccacttggatcaattgagttacttggcttatcagagtgagggaatctggaagaacctgaggcactgcgggaagaaataattaggggagccccatcccccacaagaccagcaaaattaatagcttgcacagtatctggtgacaatttcgtccatgtctccttctccaggaccattttaagcgcctgtaagggagaaaaaccaaacaaagactttattttcacgttatcatgtaggagaggtgatgcatgaaattaactagctatgtggtattggcaatgtcagcccaataggcattgtaaaacggaacttacatgcatgctttgcctatgaaatgcagtgaaataattttcgcatacaccctttagcttctccctaaaatcaacaacttcaaatccacagaacgcttccccagcaaggataaagatgctcaggtcttcataattttttaggaactgatgtatacttgttgaagaagcacctggggaagagagcaaaactgacacacggcttgttgtaagttgccaaagatttctgcgtcctctctgaagagtttctgaaacaaaagctgcactttcttttcgtaaatagtaccatggtgactcgctacttgatactctatcttcagaattcctagactcatctattgcaatattagacgccagctgcactgaactggatgttccacttccatccgactcttcagcggaaatggtacaaggaggtatgcttcccggcaatagaccaccatcctgtgggtcacatgaacttccggtcactgaatcaaccatttgagttgttgcaagactgggtgagaccaaaatttctgcctgttccagttcagaagcttagcccttagaagttagaacccattagagataatttaaacaaattaacattgacaacatacagaaaaaaatcttaaggatgctgacaatgtataagatacagagcaatgaagccatcaaagagaaaagattttaggacccattatctttcaagccgaaagggaataagacaaaaatattaaactaaaattaaagaacttatccaaattcttggacaatcaattacctaacatagagtaagttaacctggtaaatcccgccacagaggcttagatattaaaccccacttaattgtatgttaactaggaaatcaagtaataaatttcgagatagatccctatcaataaagcaggtcttcttagagttccacaccaccaaactaaacaaacacacagtaaatttacaaccatatgctaagatttcctctaactacagtgttagagagaagttttaggtatagtttggctcagacaataagtaaaaggtctgcagaggtgtttaagactatgagatctaccaacaaatattatactgtagtactgaaattagaaccagaggctgtttcaacaaccctatcaaggtaataagaaaatgttaaatacaaactaaagcaaggaatggaacctacctccttttctggcgtgaaactcattatctcatggtatgaatatattaactgaaaaagcacagctagtgttctcaaaagacattgcctaaacttggattctggtgtttgaaggcatagatcgctgtaggtaagtctgaaattaattaaaaaaaaataaaaaaatcagcaaggatactagaatccaaacaaaagggaccagagataaatactagataatgtaataggtaccagtaataactcaagtgcatagagcatacctactatattgggtggcagcactgttatcctacaaaagcaaatatatatacagagaatagatcaacaatctgattggtttgatatgctgacgttaataaactcatttcgtgctcattcgtgctcagtatgatgaagtaaaaaagcattaccgcctatgacaaagattgcatgcagaatgaaataagataaatcacaacgtgtaaaaaaaacttgtactaatgtgcaggtttcaatttgctactttcgtgtatctgctaggatcaaaagtgacatctaagcaacacagaaaaaggattgcggcttgcaccaaaaaaataggaaaaacaacgattgcgctatacaccagcaagctcaatacattcaaccatccaagcatgcacgactacatcctacaggagcaacaaatgatatttagctcacatacctccccaacaatgctctttagcactgagtgggtttctgagataacttcttgcataaagaaactttgtatcttttctgcgagaccagagacatcaccgatcagtgcataagcgtcgaggacctaaaggtatgagcacataaacaagttaaatctctgaacaaaatttctagttctccactaaactgaaggcccacaattcaatccttttagtttacaaaggagaaagctacagagatacatgagaatgagttggcttactaaccattacataactatcttctttgaattcctggcaaacgcccaacaacagtgaatccagcttatgaagagttcttcctaaccaaaccttgaaaagagtatgagaagctcaaccgactgacgatagaaaattatgaagacaatggttggtcatgaataagctataactacctcaacaccacgggtcatctcttgggctgctgagaactcagatagactgtcaagcagctgcaaatactctgataggacttgaaatgcctgcataataaggaataaattcccatctcttgttagtttcataacataacatcaccataattcatataagaaaaccatggaagtatacaacagagacgatggtaaactaccaaccttgcaatagtttccatcttcaacaaggtcttcaagatttgactgcattactcttgcatggcggaggtcagttagtataggaagcatatcctgcaagtaaaaagattaaactttcatgtcgctcttattacatggtatccagagaagcaaacaggcatgctaggaataataatctcaacagtatgtttagcaattaaaacaaaaaattaggctaggttacacttagattgtatctaagaaactacttgctagaaacatcctgttcgtaactttagagattaaaacaaaaaagatactcggccactttctgatagatgataatacagagtaattttgtacacaaagttctagagcacattgatggtgatttcagaaggaaactataacacatgaaatatttcaagaaagcagattaaagaaacaatcagtggagcctagatgtctgaaataaattgagaagcctaccagaagagcttgtttctttttggaatgagtgtgtacaataagatctcttgaagcctcattcatagaagaagtcaaatttcgtcttccattctggcaataaacacacaaaaacagccaaaaccaagtcaaaccagtaatagataaaatagaaaataaaaccactgtattgtttatgtaaaatttaggttaagaatatgaaactcataccttgcagatgacatttgcaatcttcaaatctttctccaattctcttaccaaattcatccccttcactggccaaaagcaaatattaatactcacaaaaccaaacgcatatgatcttctcaattcaagaatacttacccattacttcatgatgctccataacatggtgagacagagtttctgccactttatccagctgtaccaacctcaaggtagcctacacagtaaacaaaacctattaaactcactaactaaaacgttcatcaacattcttaacctttcacaatagacgcatcagtttatattcaattccttgagagaagttaaaagttagtacctgcttctcaaaataagctaactcactttcatcatccggcacattctccaaaatatgccttaccggatcaaaatcctacacaacaacaaaaccaaaatgtcacctgtgggcttagtaatgatatcacaaacaccaaaacaaagcatacacacacacagacctcttcatagaaaccttcttcaagctcttcaacttgttgaggaagaggtctgtttccataaattgagttaagctcagtagcagtagaagatatactcaatctctgatcagaaggaagtcccgccaaagcacgagcaaccgcagcagctgccgcagcacgtgctggaatctacacaaaaaatccaattctctaaaaaactccattgatgttaagaaatcgaacaaaacaagttaaagttgagattttgattacctcaggacgatcggagatagaaggagaaggtaagagaccaagagaagtagcggatttaacagagctgaggaatttttcaccaactttagataaatccatgacaccagtgccttgggataataagaaaggaagtaagaagaaaaccctagagctctcgaaagcagcaccagaaccaagttcgtttagatctccaccgccattgaagagaaatggattacccaaaactgaaccgaatgggaagaagagattaggctgcatctctcatctcttctttataccagtaagatcaattattgatccatctaatttcacgatcggagaaaatgtctgtctgtgtgttatttctttccggcgagtcacaaatcggatcgggaagagagatctagaagaagaagaagacttttgttgagccttttgatttgtttcgacaatggtgtgattaaactcgctctctttggttttgtttttgttttgttttacccaacaaaatgattaaagccagtgtttatttaacactcttcttccaaattttctgtgtagtgttaaatgttttttaaaaccggaccggtgattgaaccgggtaaagctcttgaatcatcaaacctgatttttgtgaaattgatccatccaaaagaacggtataagatcaacctttgcaaatatctcagaattgtcttttttgtttctctttatatgaagaacttgagcaaatgttgttgttgtggaatcaaatctttatcaactaactgattttgttctatggattctcattctctctaaatcactcccaataagactcctttcaaaaacaaccagtttctactgaaaacattactttgattcattgtgaagattacgataaaccatggaaagttgaagcagaggccgacaattaagaggataaaagaaattgtcgaagaaaataaattgtaacaagaaattagcacaaaataccataagtaaaaagaactgagccaaatcatcgtccaaaaaaatcataattaaccctttgtcttttcacaaacgataaaagtagtcatcatctgaaaccaaaacgcataacataagtcctaaggcgcaaaagttggccagatccttcaaaatattaacagccaaacccaaaagagataaccgagagccgaatatagttttcataattattaacggcttttaaaactggcaagagaagaagtgaatcattagcaataaaacataacctccttgacgttatcttttattgctgggagctgcgaaatgacttgacccacacctgttgttgagctcctggacctgctcgaacctccatcagacatctcactctccatgtagtagcgggcacggaatgcagccaagtgagcgtagtaggctggtggcacaattgacacagattttgtacacctcgcatacctgcatatgcattttattatatgttttgttagtttcagagagttaaaacatgtcataaggaaaatgtacaatgttgttgtctcttacgtgtagcagaggttgtttgtgagcatttgcaactgatcagcggtgaaaccgttctcatcgagaagtacatggtaatgtgccggcctgcttgttccctattaccattcaaacattcaaaggaagttgtaattctgctgagacaaaacaggtcataaattggtctagattctggaagcaatacctgaataccagcatggctgttcaaatagaagtcgaattcattagggtgacagattttagtgtccacgacagtacctgataaggaaatacaaatatgttacttgaaatctggatcattaaaggaattaagttgatagagaagagcagagagtgagaaacctggttgaatattgccactcttatcagtcatatcacgattcccgtgttgctcagggaacaaacgtgtgtggtgacgtttctggacaatcacgaaagtaacacgaggaacataattctcttggagagagttacaagccttgcggatagcagtcatctcatgtagcagaacctgactaaactgcccttcgcttactccgtcactgtataaagagaaagcaattagccaaacctgctcatgctatgaaatgtttaagcatggaatgtgagaaccacttaccgatagaagatgatcctttgaggtatctggcctgtagctctcctgaatgctatgaaatgttccctgcaatcacaaacagtgtccattatatttattcttgtgaaaaatcaaagaacacaagaagttgtagatgttttgctcttaccttatcaaaccagagtggactagcccacgttgtggatcctgaaccagcttatacaggtcctgaataatttcttccctatgagcttgagcagaaaccaatcctcggtatttgtttatctcaggccagtccatagaggccacaacctgtagttgaaataagagaattaccttttatgatgaaacagtagtataatgagatacaagtaaaataagatatacatacagcagcaatagaaggacttgagtcctctccaggctgtgggtgagtcacatcagcacccatgatgatggttggacgatcagtaataagaggtatgtttcttctaatagcatcattaagaacagtgttccttcccccagtctgtaatacaaatacccgttttacaccatcataaaaaacaataagaagcacagatgactagaccttgacattgatcttcaaggcaacattttccatgtactgcttgttgagtttattaacttgtctaggttggcaacactgagagacaatccccaattctgtttcacagatcctttttatttttcctgcagacagaaagagtacttcatgaacagattgtcggaataaactttgcaccaaatattaccaatcattagcacagacttaccatatgatccagtcacatcaggcaatattacaatcaacagttggagaccaggtgcccttttgtggatatcgagaagagcttcctcaatatgttcagggggacaagagatgaacggaatagcaggttgaggcttaaattcctggcacaaagaattaaaacaaaaaaaagagttagtaaattttttggtatgaaattgtgacaagtatcaataagcatgagacaagacagaccattcctttgctgacacacatcccaatcaactgtttgcagaactcttggggtaaaccacggtcaatccgagtagagaaacttacgcaagtccaagaagtgacttttgctccattaaccattttctggaccatatcacagccaaaaggaggtaagagccccaaaatttggtaacacacattaaaccacaatagaagcattaaacacaaatcttcatcactaactatttcttccgcatccacacgcaaagcagtaaagtatagtataatttatcattataagagaaatagaagcatatttcttatttagtttcaagtgcctacagagagcaaaaagattatgatagtcaattacagttttaccttgtcaatcatgttccactgtcctagccttggatttaccattttctctttaccactgtcatggtacttcaactgttaacagaaagaacatcgtgatgagcaacattgacaagaaaatgcatgataataaagcaaattaataacaaaaatggagaaagaaaatcaccatcggtgggggaagtacacgagcttcaatcgaggctagttgggtagtcactgacatcccaaactccttgctcagatcatcattgtaattatttttcacaaccaactaataatataaacaacaaacgtgatgttagtcaaaacagaggtgcaaaattaaagactatttttccgatggaggaactactgtatatgtaatgtaaagaggactaaacctacgtttttgatcgagttctctctatcagggggtcgttggcaggtagcttttagcaatgcagtcacttgcttctcattgagccttttggtgtatctttgcccttcgtcaatttggcagagctgcaagaaccaggaataaccagatctttaaggatacaaaatgaatccaagaaaacgatggaggtaaaaaagtagatgttattaaaaatatacctccattggtaggtagacgggtcttgtgtcactccctgtttgaatagcaggtagagcctggtatttcactctataattatatttttcagcaaaatattgaacaaccgtcttctctgatttgtcctccagagtgaacctgaaatgattagaacataggcaacatcagcaaatttataaccaaagatcagaaacctcttccaagaaaagcaagaaaacaaagttcaacgattatgcaccctgctaaagtaagcatcttcaccttagctccctgatgggtagactagaaatcccactaattttggcactttttgtgcagttccagtgaagcaacttaactttcagtgtcctcaaaactttcttcacctaaataccaacatatgattttcaagataagaatcatatataagacatcatcttgaataatattaataattaaaatggtggaatataagtcagatatataccttaagtcgatctgagtctctaagtggcctgtttaagtcccttatattcagaaacttgctaataaagtcagtgacaacaatcggttcataaaatgatcttgctgaaacgtctgcatcataagaaaacaacacggctataatgaatcaaaatcatctgcagttaaaaccataaagtagaattattcaaatctaaatcaaataaaaatataagaattaatcaacatcaccaatccagataacattaagcatattcttaccaatgttcagagacaaacccatctgagtcagccttagactttggaaataacctctccagtactcaataccatctccaagctcacccctaccatctcttgcgtcctttcccaaactagtgtggaaaaaagacctcccaacagagacataactgaacagaaagcaaaacagggaaatgttaagtttatgcatagcttttgacaatactgaagtttatgcaaatttcagatttcttactcattagagggcttatccctaagaacaacatcaagcacttggatagtatcatatggagcctctctttgcttacgatcaaggaactgttgcaactgataaagatcagtgcttgtcacattctttacagcaactttaaacggtctgtccttcctgccaaaaggagtcacaatgccaaaaaaaactatgaaaaacaaggcgatacaaacacattcacaaagagttaaaacaagacattacccagaggaaccgtcagctcttttctccgccagattcacaacaaactctttcgagtcaaaaggtaatggaccagcagtatagaggcttttccttccatcatacgctggtgacttccctcccaagtgagagtctttataattcttaaccagaagtttcatcacgtttctgttcactgtctttgatataacctcaggattgatcgaaacctataacacaataacaataacttttagccaaaaaatctctatatgactaaaacaagtcacaaccgcagattcatcatgtcaaaactctctctaggaactttgtgaaatacatcagatcaacaataaaaaggaacaaacaacagtatattcgtcgaatgaaagcaaaaaaaaaaaaaaaccaatgatgcagaaactaacaaattttcagtcagaaatctcactgaaagaacaacttcagatgaacacaaacgacaaaaaaaagttcatcttttgacgtacaaggtttacaaaaactgaacaacaacaaaaagcaaaaaacactataacttgatgaaatagaaacgacaatatttgaaatcgacacataaaaacgacaaacaagtacagattcgtcgagaaaaaatggccggaaacttacatcgtaatggtagagatcacgatcagcaacttgaacaaggaaatgattcgcacgaaccatgactttcttccccaaagtaccacgtcctggccgtaccggaaacgtaaccgctttagatgacgccggaggaagtgacgtcatttcaggtttcgtctccgtcgaagtaatctgaaggttcgacatggtctcagaaacctccgtattcttactttcctctttagatgaagaagcaacagacaccgtcttagacgaagacgcaacagaaaacgtcggatctccgatgttaccacgacctctcccgccagaaacagcagaagcaaccggaacttgcgtcgccgtcagatctccagtattttcacctcttccgacgtttccacgacctctaccggcggaaacagaaccaccacgaccaccgtagctttgttgtaaacccggccaagcaacttgaccagaagactgatcttgtctctggtcagaccttcgtccacctcctcgaccacgactagcgccgccgtgaccaccaccaccacgatttgacattgtagcggaaagcttcccaaagtagaaacaaaaatcttttcaaaaacggagagagagaaaaactgagaaaatgagagagaaaactggttacttgtgtgtattgtgtgagagtgggacgtctaggttttaaaaggaatctaaaagatcgtcggttttttaatttgactattttgccctcatctctttgcattcccggtttttttatgactaaataaacgaaattatcattgaccattttgccctcttcagagttaaaaggaaaatcgaagagttaattaaattactattttaccgtcgtggcttttttaccacgttccacgtaatttcatctgtggcggtgtgggctgttgatcgtacattttcttaacttaactacagtctattttaactctactagtattagtctgttcacttttttataaattgatatatgctttttgcagaaccagaatagagatagaataacagtttttaccactattggcttatgttttcacttctgctttaatttatactgatttacgaattacgaatataaaggactatttattttgacaaataataacaaaagaagaagagaaaaataaaatgagttacgactatttgtatataatttgtttgtataataaatgttcaaatataaataaataaaaactccaaagaataaatataatttcagctaattatgatgatattgatagctgacacaaatcataattccctctttaactacaccatctcaggttttatggcagcttcattggttacgaggtctgatttttttatttttactgatgttagaaatacaaaagctacggtattaatgtttgttcttatcatctttcgttaagccctttgtcgtacgaaaccatttttttaatttgcttttttattagggtttgaaatttgaataatgacagtgatatttgaaaatttatttgcatgatgacgacaattgacaaaagaaaagtttatttgcataataccgcttttatctacgttgcaaaggactgatatgcatataaacaaattaatagttgtctatcttttatttgttttaaatatagtaataaagatcgttgtgtttatttgttttcttttacttaggtacttgcaaattacttgatagttgatacaagaaaagatagaaaattcaacttttacatgttcatgtttttaatagtggaacgataggctaaacttttttatcacgtaaataagggttacaaagtaattttgtatgctaatccttatttgcatctgtcaacattcaaaattcttacatttcaaatgggattatatagtaaagggatttgactaatgactaaataatgtctatgtaacgcgttcaaaatggtaatggtaatatatattagtatatagtaatagagttgatgcaagtaaaaaaaaatcactaatgtgagataatttttcctttttagatacaaacgagtttggaacgtggtacgtatatgaacagtccataacataacgtgccaaatagaataatcgattttggccgaattaagttcatggatggttacgattgaggtgtaagtcgtaaagcggttttggtagaaaatcttgtggattcgattggaggatcaagagtatagtcaagacattgaaattgcattagaattgttcaagaaatatactagaatgaaataaagtaaaatgaattcttttatcttcatgggctagtacctagtaataccaaaagaaatggtatttttggagaaattagaaattgatcgtgtgccatttagttaaaggaagaaataccaatttttccaatccagtttcaggccaatccaacccatttttaaaattcttaaatctttattgtagaacatggttttatgttgatcaaatagtggtgtccgtataacttttaagtgatttgcaatcatatttgggctatatctaaacctgagactttgagccgaccggtttattcgatttcggtttgtcagttttgcagattattcagaaaacaaaacctatcccgaatcaaacttattccacattattcagttcgttcgattcggacactcatatatatatatatatatttttattgktttctccttttatttgtttgcatctaactagtgttcttaattttccttttccataagaaaaaactaggagtatgtttagttgtatttgtaatctttggtatcatttaggtgtaacttgggatttgggaaaaatacatgattcaagtttggttggaacgtgttgtatgataatgaagaagcactgaagcattgatcagtcaaaatgctcgggaaaaggatgattatatgaatgttgttgcatagggtacaactttgtgataagaaacaaacaacctcgcattgtattatttattgtatagcgagtaggaagtagtactatacgatacttcttcctataaagttatatatttataaaggtataaataaatatatacctacgaaaagaaaaagtaattaaatttgtaaatggatttgtgcaaaatccaaattttaaagaaaggtatggttaggatatttgatgagagtttcgagggttttgcttctcggaaaggtacctaattattcatcattttttctcttctttttttgtctcaatccttttttgaaaagaccaaaaaaaaaaagcaacgagaaattagcatctttttttcatcatatgtgtatgtatatcaatgatcgaacggtcgtcagctcactgtgaggcaacacatgaatccaattagttctcaaaatttatccattatccacaattccacataatggttagcgatattcatataaactctcttcataatgatttttttgttgaaaaaacttctgatactacgacatgcaaattagaagcagtattaagaaacttacttttttttttgacacactatttaagaaactacttaagagttaagagttaagactgaagcttaattaaaataacgtcaataaaatcatattttgtttaaattatttccctttttgggcaaataattaaattatttcctaaccagtttaagtttcgtaatgcaaaatggaatctctaatgttgctgggtcaagttttcttctacgtagaaaagactttttgtattgattccccaaagccattcttctcaatgtaaatttgattttatcagaaataataacccaaaaaaaatactccaaatgtcttttcaatataaaaattaataatttgacttgatatcaatcggaaattacaagagagtatgggaagtcgtggtaccggagagagtgcggctcttcctatggcttggaatgcagcaagttctgatgacgaatgctgagaggaggaggaggcatctaagtgattcggacatttgccaaatctgtaaaggagctgaaaaaacaatcatacatattcttcgtgattgtcctgctatggaaggcatttggatccgcttagttcctgcgggtaagcgccgagagttctttacacaatcgttattggagtggttgtttgctaatctgggtgataggcggaagacttgtgagagtacttggtcaactttatttgctttgtctatttggtgggcctggaaatggcggtgtggcaacatttttggtgttcaagacaaatgtcgagatcgggtgcgtttcttaaaggatctggctagggagacgtccatggctcatgtgatagtcaggacactgagtgggggtcatggagaacgggtggaaagactgatcgcgtggtcgaaacccgaggaaggttggtggaaacttaatacggatggggcttccagaggtaatccgggtttagcgtctgctggtggtgtgctacgagatgaggaaggagcttggagaggaggttttgctctgaacattggagtttgttcagcacctttggcagagctatggggagtgtactatggcctctacattgcttgggagcgacgagtcacacggttagagattgaggtggactcagagattgttgtgggttttttgaagatagggataaacgaggtacatccgctgtctttcctggtacgattgtgccatgacttcatatcaagggactggagagtccgtatttcacacgtttatagggaagctaaccgtcttgctgacgggttagccaactatgcattttcgttaccattaggttttcattctcttagtttggttccggattctttacgttttattttgttggatgacactagtggagctacggtttcacgtcaagtgcgaatgtaattttctttttcattaataaatcttgggagactttgtctcccttggcttacccaaaaaaaaaaatcgaaagttacaaagaacgatttatctagttaaaaagaagttttttcttaactcttaaacacaattattagactactaaacattcataattaataatcatacaaaatgattagtcgaacaaataaaatatcgcatcctttccaatttaaacgagatcacgtggaagcgagtacacaccacgcgccgatacagagagtgagatttcaaaattcgacgaaccaatttgcctccgttcacatgcgatgcatcttctctcttaaatatccaccgtcaccactctctcttcctctttagattctctctctacagagaacttgattattttttctgatctgagaaaaaaaatggcgaatggagctaatagagtggatctcgacgggaaaccgatacaaccgttgacaatatgcatgatcggcgccggaggtttcatcggttcacatctctgtgaaaagctcttgaccgagacgccacataaggtgcttgcgctcgatgtttacaacgataagatcaaacacttgcttgagcctgataccgttgaatggagtggtcggatccagtttcatcgtatcaatattaagcatgattcgagacttgaaggtcttgttaagatggcggatctggtaaaaatgcttatcgatttcgttttttgatctcttgttcttcggtgtttatgatagaagtctcagatctgattcgttatcggaattcagatgtttcgcaatgtattgagatcggtgatgttgtgatgtaattctgatgtttctttttggattcgcagattataaatcttgctgcgatctgtactccagctgattacaatacacgtcctcttgatactatctacagcaatttcattgatgcgcttccagttgtatgtgttttcttcttagcttcgttcattgttttgctttagctcttgtttttgaagttgatggagacagtgatgattgtgtaatgcgttggttttgttaggtgaaatactgttctgagaacaacaagcgtctcattcacttttctacctgtgaagtttatggaaaaaccattggaagctt
